United States Patent Application Publication US 2013/0096032 A1 - sequence listing, part 6

SEQ ID NO: 155 - DNA, 98957 bp, Arabidopsis thaliana
aagcttgtcgttagttatttctctcggtagaatcaaacaaatttcgtattgtgagttcaatgttcttggttttaatatggagttacaagtctgatgatggagtatatttatcgatttttatgttgacattgttctagtaactttgtaaaaccaatccatgcttaacattcctattttctaggcgagtgatgcctttttgacactaacatgtgagtgtgtttgggtttagaaattgtgggtgtaaccacccgccccgtgggacccagctggcgctgcagcacatcaaccctaacctcttttcagtgggcccttctagcccaccaggtaggttattggtgcgcttggcgttcctcgaacccaagacctcaccctttaacaaccttcccacaggacaaactgttaccaattaatctaaagggtgaggtcttgggttcgaggaataccaaacgcacaggctcacatgaaagaggttagggttgatgtgctgtagcgctagctgggtcccacgggacgagttgttacagtgagactttggaaatagaagcaacctttatttgattttggtcactgttcttatttatatcaatgtttgtaggttacaaaagacaggaagtgttcggacaaaactgtagatttctgagtggagttgatactgattcctcagtactatacgaggtactgattgtggttaacttgttagttagtgtcgagtgaaagatctaatttgattaatgtaaaaaaatctcgaagttacattgtctctatatgatctcggttttttactttacaaattctatatcttttacatatagaagtatttcacgatctagaaaaccctttaacaaaaaaaaaagaatttcatgatctcttttttttttctcgtagaaactagatgctttaaatatgtgataaatgtttaaatgattaatcaactgcacatgaacaatattgacaaacaaaaaccaaaaaaaaagaaaacaaaacaaacagaaaaccaaattaaaatacatattgaaaaaattttatagatgaaaaaggataacacaatggcttttctacattatgatattatggatgaaaaagggtacatagaaaatagggataatacattttctttctcatttccacatatgttggatacggacaacggattttgcatttagcgcacattggccgagaaggagacttgttgcgttgcaagaaaactcgaacctgacctccctcctttgggggagtttcaccagacttcatatatggttccgggccaagtaagcaattaatatgaagtgtggtacaacactcgttgcatttatagaagccttcctttcctccaattgctaatttgccttcgcataactcacaccagtctgcgccacttgcctcatctccacgacaaaatgtgaggtaatgttcatcatgcttataccttaccatgtatggtaaggtagcacacttaaaacatataataaaatcgcattggaattcaatgtaattcaataccttttgaatttatgttgacctgcaaatgtggcagattggctcttctttggggtctaaagacagaaataaggggtggtgatggccttgataatcaaacggctcagaaatagaggcacacactacatctagattgtagccacaatcttccatgagacactcatatccaaaactattactcatgcgattacacgcctgacatgagaagccgccttctacgtgagtaaacttttgtataagtggatggggatgtaatggatggaccttcttacggggagcctctacacatctttcatgtaggatgaagtcacattctacacattcataaaaattcttctcgtagattggaagggcacatgcttgacaaaacttttcttggtcgtaaacttcacttgtcttaaattccagttgacaaccatgagaaaagtgaagtattgttccaccagctatccctttgaacggaggctcaacatcttcatcttcttgcactccctcgagttcaatgccatcccatatatctgtgcgcaatgcacatcttgtgtgaacagcgtagccactacacacacaacaagtgtatgcaccataatcatggtcaacctcacgacgacaaactccacaagaccatttttctaatggaagagaagaagtaaaagagacacgatggtggtgacgagatattcttatggtttgtgggacatggatgcaatcactatgggctacgaaatcgcatatagaacgacaaacgtaggtgagatggagtttattgaccaaagcacaaacattgcaggttaaggaagcttgtctagggaaaagagagagggtatgatcatgcctttttggttggtctataaaaaagggtattgccgcctgagcacaaaccgcatgcatataaatgtcacacagagcacaataataaatgataagatctgctctgtttttgcagatgatgcactgatgaactcctcgcagagatgaaaagcaaagttggagagtatgtttggcgtgggtaggataactgatctcaagtggagactcgatacattctttatggtacgttacatcacactcgacacagtaataatagtttgtgcctgccttttgcactctgcaaatattgcaatccatctttggatcagcttctttgttgttgcaccaaaaaagagggagtacgacatgatcatccgatatattgtcaccatggccttggagaggggaagtctcgagcttgaaaaatttatcacgtaaggctttcccgtcttcatcccctaatgcaatattctgaatcctcgctgatttttgcaatcgtaaattaaggcagatgaaaataggtgaaatagggaggttgtctccgtcaccgatggttacttcatcggaggagtttgttttgttttggagtgataatggtttttggatggtggttttttcagcggaggagtttgaggtgtgtgtttgtgttgatggtttcattacgttgtggtacagaagatatggtttcccatcgatttctcccttatgaaattctccgaacaagtccatggctgctcaatcggagattatttgttagaggatattgggatatttttatcctgaagacgtttatatataaatgtgctttgtccaagctttccaaagacttaaacaactcccatttgcgatcagtttaatacttatttcatactgatatgatctagtcgtaattgtttattgagtaatacagtttcagtggtcgtatttctcataaataaactttgggttataaaactatattcacaagattattggttacgatatcgtaaggaaataaattaatccatcttcacttagaaagttattgttttagttataattttatacagctaagctgaagtaaaaaaattagatacagctaagataaggctggttcatagtatatactcccctgtttctaattaagtgtagtttaaaggttttttattttttcaatatacgtgttgttttcacttttctatgtaaacattaaatatatttaatagtttttaaccaattatattttacattatatttttttattggttggattagttgtaattaatgatgtttttataggaaaaagataaattaaatgaaatttatatgttttattaatttgtgtacaaaaaccttaaactattgagaaacagagggagtattaattaactttgtttccaaaagtttttatgtattaattattttctcaacggtctttttgtattatatgagatcatatcaaccgtattaataggaaaatcctctagcatgtgttaaatcgtgggagagttgttgacacgatttaatatttctgaatatcaataaacaatggaaagtagtgctatacggacatgagtggatgattaagttgacctcttctcttgtcaatttacggaccttgattttgaatggtgagttataagacacgaatcaacagttttttttgtctttgcgtcacaagctactattgattacttattcgttattgtttcactttttgtagacaatgaatcttctccatttgcaagctcgatctactgaaagacttgaacagtctcggtatgttctttaacacccaatgtcattgtacataaatgtttattgaattcatgcagttctttctaggaacccaatcagtgaaatgggtgactcactttcaaagttgaaaaaccattggagatggtcttattgttcgttgatgagatcgtcagatcaattatattatatatggcacatggaccattaaatttgaattgtaaaatataaaattttattagtagatattcatatgcctagttgatccagttgactcttcctgtttcataatactagtatccaccctcttctcaaacgggattgttaaaatcttatacattgcattatatgtagcctttacactaacgttttacttgatttttcttttggtttggttatcgatcgatgatcctgatacaaaaaattacaactataaaagtttattttctttttggttcggtttcaataattattttggtttggttatgatcacctcaattggaatggacatctcaacatgtgcattgtgagtgagaatttgtcttgaaaaataaaagaccttgcaaccaaaaccgtttgcataaaaaatgggtgccttttattgtttgtgaattgtttttcatctgtttttttttcttcattttttgttttctatctttggtctaaaacagtatattatatgttcaaaatttttttttagcaaaaaatctcaaggaatgtggcttttttgggtggatgaatgagaagaaattagcaaacaaagtttcgtattgtgtgttttgggttattttgttcgttttactatggaattacagtctgctactatagattatccccatgacattgtttctttaactattcagaaccaatccatgcttacccgacatgcctatcatttacgcgagtgatgccttttttgttataattctcacctctttcactctttaaggtttgtcatatctctctctgtctttcacactctgttactgtttcattgtcgtagagaacaaaaacaagaaccaagtcaccaaaaaaagtatacaaataaagtcaccaaatactgaattaaataaaagtctgctacaaaccaagtcaccaaataaatgaaaaaacagagctcaaaaacatagagccaaaatcaaagacaatggaaaaaaggacaaaaaaaaaaacaaaattaaactttaagaaaaaaaaaaaaaggataactcaaatagtaatacaaccagtaggggaacatagaaaacgatatgagcttaccgattcccagaaaaacattactggatacggacgacgcatattgcaggtgccgcaaattggacgaggagaattgttgcgtataactagaaattcgttacgacccaacgtgaaagtttgaccgggcttcaaaaatggattagggccaagtaagcaattaatatgaagcgtagtacaacaatcatcgcacttatagaaccctttttctcctccagttgacaattttccctcgcataactcacaccaatctgagtcacttgcctcctctccatgacataatgtgaggtaatgatcatcatgcttatatcttatcacatatggtaaggtagcgcattcaaaacatataataaagtcaccctcaatgcagttgagtacctggttttctttcgttgacttgcaaatgtggcacattggctttacgtttgggcgtaacgctaggaataatgggtgttgatggccttgatagttgaacggctcagaagccgatgcacatactacatctagtatgtaatcacaatcctcgaacgtacactcatatccgaaaccattacataagcgatcacatgcatcacataagaataaatcattttcatggacaaccttttgttgaagtgcatggggatgtaatggatgaaacttcttttgcggagcttctgcacatgtttcgtgtagaatgaagtcacattccacacatatataaaagttttcctcgttgattggaagagcacatgcctgacaaaacttgtttccgccgacgtgaactccactggtctccaattccatttgacagccatgagaaaaatggagtattattccatctgatatccttttgaacggcggctcaacttcttcatcttcttgtactccctcaagttcttttccatcccatatatcattacgcaatgcacatcttgtgtgaacagtgtagccattacacgcattgcaagtgtatgcaccatacttcctgtcaacttcttgacggcaaactccacaagaccattttccttttagaagagaagaagtgaaagagatacagtggtggtggcgagatattcttatggtttgtgggatatatatacaatcagcatgggtgacaaaatcgcatataggacaaacgtaggtgaaatgaagttcatcaagtacaccacaaatattgcaggttaaggaagcttgccttgggaaaagggtgaggatatgggcatgcctttttggttggtctatgaaaaagggtattaccgcctgggcacaaagcgtatgcatatacatgtcacaaagagcacaataatatacgagaccgtttactttttttctgcacatgatgcaatacttgaatcttttcttggaagagtaaagttggaaagaatgattggcgtgggaaggataattgatcctaagtggagactcgacacattctttgtggtacctcatatcacactcgacacagtaataatagtccgtgccgaccttttcggctctgcaaataacgcaatcgttctctggatcagcttctttattgttgcaccaaaacagaggtagtacgggatcatgatcaactgacgtattgtcaccatggaagggggatgtcttgagattgaaaaagtgttctactgacttcccttgatcatcctgtaatgtaatattgtcaataatcactgttgaggtgagtcgtacaatagggcatgcgaaaagaagtggaagaggtaggttgtcaccggagtcaatggtttcttcatcggaggaagtttcttcgttttggattgataatggtttttcgatggtggtttcttcatcggaggagtttggggtgtgtatttgtggtaatggtttcataactttgtggtatacaagaaatggtttcccatcgatttccaccttacgaaattctccgaacaagtccatggctgctcaaccggagattgtttatgagagggttttgggatattggtatccttttgcctttacatatgtctatatataaaaacaaaccactgaaatgtgctgtccccgttttaattttcaagctttccaactcccatttgcaatttctttacgatatatttcataatgatatgacctagtcgtaattgtttattgagtcatttagtttcagtggcaaatatttaaattatgagctaaatgctattattacggtagcgtaaggaaaatcattgttttgacattttatatacagctaagcttagctggttgacaaaaacagatacagctatgtacggttgagaaattaaaaattaatacacagctaaggttggttgatatattttaatttactctgcttcaaaagtctttatgtatattatctaaacggtcttttgtatttttattatttacatgatattctactacacatattaattgaaaggattgagatcgaaaactccattaaaaaaaaagcttatttatcttttctagagtgttttaaagttcacatccattaaatttaacaaatcaaaaatttctaacaatcatcatatgcgaccgtatcagtttctactgattctcaacccaactacagcatatataatactataacccttacctttagtcgttgatgagatattttctcatagatacatgtgggtcaagttgatccagcttactatttatgttttagaatggtattttcgaagtaactacatgtcaaattgatggcttctggaagttttctgatttcattagtggtttaggttggatttgattgcaagtaaacgcataaataatgctattaggggcaatgtctcaacggaggagttcaacttctttttgattcggagatcgaaagtgtaatataggtcatgaagaatattttttaatagattgtcatatgtttgaaatagattgtacagagctaattccaatgatatagcttcctgaagattggtatagtttctccaatctactagatgataggggtcattttctctaatttgtttcttactcctactgtttccaaataatttattttttagtgttttcacacatacgaagaaaaaaacaattcttgggttcaccccttagggatgaatccattcattcatcctttttaatttaccaattagaatttgacatatcatctatttaaagaataaataaattaaatcacaaaatctaaatcttaaccactattttatcaacccaaaccaaaatataattttgttcacaaaatctaaactctaaccgctattttatcaacccaaaccgaaatataatttcgttttaatcacaaaatctaaaccctaaccactattttatcaacccaaaccaaaatataatttcgttttaatcacaaaatctaaaccctaaccattattttatcaacctaaaccaaaatataatttcgttcaatcacaaaatataaacactaacaacaattttaaaaacccaaaccaataatttctttaataaaaattctacagaatttgtttccttaatttgttttgttttattgattttaatttatttgttcattaaatagatgatatgttaaattctaatttgtcaataaaaagggggtgaaatgaatggattcaccccttaggggtgaacccaagtatgtttcttaaaaaatatattatattaatagttgtttataaatatattattttatttttaatttacagttttctataattctaaaccaatagtattcaattatttttctcgaaatttacaatacatcaataataattaataaatattgcattaaaaacctaaaaagtttattttttgaaataaactttttttaaaaaaaatctatcatttagaacagcggaaatattatttctcaacgtactaatttaaaggctgacttttgaacattttttggtcgatctatatcctcctgattagacattaaagagtagttttctaagtaaaatgtggtttgagaaaaacaaacaaacataattgcaagtggacttactaaacccaacttttataagtgaaaatgtttgtttataattggtttcattaattgggaatttaaaaactaaaatccaacaaccaattctttttttgtaactcgatgtgttaaatcgtgtgaaagttgactgaaaacaatgagaagtggtgatgtaccacgatatatatatttctaaatattaataaatcattgggaagtagtgctacaccgaagttgattctaatttttaacataagaatatacaaggcacatggaccgtttcttgtttagtcaataaatcatttatataaatttaatacttaatttgatatgtttacatggaacgcaaacaaacaagaaccaaaataaaaaaacaacgttttaccaacaacaaagaaaaaaacacattaaaaatattattgcaagtatatacaccataatcaatcaatggtttgaaccggcacatagaaacgaagaaaccatttcgtttctgaaatccaaatatattggatacggacaacggatattgcattcacagcaaattggacgagatgcaaaattgttgcgttgaaaaagcagttcaccaccagccaatgagatagttagaacaggcttcaaatatgtttatgtgccaagtaaacaatttatatgaagcatgatgcaacatttatatagaacccttcttttcttctaattgctaattttccctcgcataactcacactaatttgcgtcatttgcctcatctccatgataaaatatgaggtaatgttcatcatgtttatactttactatacaacatataataaagtcgcattcaatggagtttagaaccttattaacgcccattaacttgcaaatgtggcagatcggcctctctttgggatctaaagctagaaataaaggttgttaatgaccttgataattaatggctcagaaatcgaggcatgcactatatttagagagtagatggtatccttgttgtaacaatcctcgttggtagactcatagctgaaactagtacttcagcgattacaagcatgacaggtgaatacgttttccacatttgcagctttttgtttaagtggatgtggatgcaattgatggaactttttacgagaagcaaatgcatatttttcgtgtaggatgaaatctcattcaacaaatgcaaaataatctcaacctcatcaatttcctaagtttgaccagccttataatatggatctaggccaagtaaacaattaatatgaagcgtggtgcagcaatctttgcacttataaaactcttattttcctccaattgctaattttctctcacatgattcacaccaatgtgagctatttgcctcatttccgagacaaaatgtgaggtattgttcatcgtgcttataccgggcataaaacccaaattcgaaaatcgatctgaaacgatcaaaacatacggaaccgaatccgaacaaaatagtcataaaacccaagcggatgataaaattttctccccaaattacccgatccgaaaaccaaaaataaaattatatttccaaaaatattagttatatttagttgtaattttataacaaaatcaaaatatcctaaataacctagatctcaaaaaacaaaaatagttatatttgttgaaattatatatatttttgcaaattttaaccaaattttaggaaggttaaactaatttttatttaaattgaacaattttttagttttttccccaaaattgatctgaatccgatatttgtccgaactgaaaccgaaccgaagactcataaaatccaaacaaataataaactctcctactaaacccgaatatatccaaaccaaaacagaacaaaagaatcataaaatcagaacgtacaataaaattttctacccaaatctgcatatatccgatccgaatcagattcgaaatctgaatgtccaggctcactaaacctaatgatttctataatatctaaaaataaatacagaaacagtgtggtttctataatagagaaaaataagtcgaacatgctcatctctaatgatcgctcatctctaatgatcaaaagatgggatgtcacgctctgtctattttcactattacacgattcacttagtttcatataattgaaccgacaattgtatcattttttaaaaattattcttttacggttttgtaaattacgtgattttagaagttttgggggtttggatgaacgattgagaaattttatcgtcaaatcaatttggaaaccgagtgatttatataatagtaaaaaataagtcgaacatgctcatctctaatgatcaaaagataggatgttacgttctgtttattttcactattagacgattaacataggtttatacataattaatctgacaatatatagtatcttttattgataagaaaacaaaaatctgtaaaagcttatatattagccttggaaaaaacaattaagaaaagacgtagagaaacctagcaatagctaaatagctaccattatatatttcgtgtatttattatctcatgatagccggttaagtaaaacaaaaatgggcaaattttaacgttcaagtgagccactagctattgaatcttcttcggccatcttttattgggaaacaattgatcccccaattgcaaaaatacacgagagattgttatggggaattctggtgattttgatgttagttttcacttacaacttgcaagcttatttgaagatctgtgatttgcttgtgtacaatctctcaaacatgtccatttagtgcattgagtttcacaataaacgttacagagattgctatggggatatatatcttgtggttgcaggttcaatgtaagtaaaagcctagacaatatcacttctatgtcttttacttaaagatatgttagaatcttaatatagtgttgttctatttattcatatatctgtagccacatttgcagcgggtcaagatgtttgagacgatcaaaagaaagcatttgattgatgcttatgactttagtggaaaggttcttgaataagttgcctcaggggggttagatacaatggtaggagagcacgggacacagctctctggagtacagaaacagaggatagcgattgcctgagcaattcttaaagatccctaaaccctaaatccaaaagagtgtggttcaagaggctttagatagagtgatggattatagattgaagaaacaaagagttcatgcttctttatgttttaaagagatacgagtagtttactgaaactgatacttagttgactcctctcactccccctagattcctcaccaattactcgataaagactcacagataagacatagaccaaaccaaccatggtagagattgctattacgggccatatcattttttcgtctatataaagtaggaatgattctgagaattattgtttgctcaaacaacagtaatcactttaatccatttcccaattcattcacatgtactaaattgttttgtttataaaaatatacaagattcaacatctaagacaagacccatttgtgttacagagaaccaaaactttcaacctttcaaaactaagcttacaagaaattgctgcattattatagaacatggaagactgtggctgaacatgtgaatgtgagaaatctgtgaacgttttcacaaatcccattaaactattttagtccaaagtttcatcatgatttcaataaattagtcccattacgcacaaatgacaaagacaacaagatgttgacaaatagaagaaagaacacaggaaaattcacctccagaagaaacaatgttgaaaattagagcaaatatactccaactaaagacagcgaactaatagaaacaacaaaaccatgtttttaagaccaaacaaaatgaagaatagatgtgtaaagctagttaaagtgagagagagagaccgtcaattagataaggttgacaaaaaacaaagtctgattctgataagagcacaaaatgatcgtctctaccttttttcatctccttgtccgtctgattctgaatctgagtctgatagacaataattttctggctgcaccaatggaggatggcctgacttgagttgttttaaatcgttaacatcaagattctctacgtggtttacaaaggtgcgaacgctacaagtttctgccttaaatgcttcaccaaaaccttgggtttctacacgttggagagtgttcgattcgggattgaagtagaaaacataaaacggttgtttagatgtgtacttgcgtatcgaaaacactatttcacccgaaacagtggctccagcaatggaaaggtgacgacggaagaatgtatcatcggtccaagtgtaggcatatttagaccattcctgtttctcaacatcctctagaacccacacatgcaactcattagtggcatcaacatcgagattttcctccaaatacttatcaagattcttcccagccatatgattaatctcataaatgtcgacatcatcctcccaataaatcatagctaatttgcccttgtagtttatcaatcgacaaatcctctctacgtcaatatatgtgaatttctcagacctaacatcaaagcaaactatcacataatcagactctagctcatttctctcagctaagaaatacaaaaccccattgatgcatatcccatcacccttaataccaggtcgtggtacgggacatttgatctttctccatgtcagatctccatctcctaatgtaagtattttatgacgaccaggatcagatggataagcaatggacaatgccttgtattgcttgccaatcgggtcaaacccgaaaaagctatacgcctttctgtaagtataccgattaggtaagatcacataccgtcctgtgttggggttacatattagaggtctagccacgtatcgatcaccatagatatatatcaagccagaggcgtagccaattgaaaaatatcttgggtcgtaagaatgattgattggtattaacttgtctggagagaacttcacatgaaattcagcggctgctacaagagttggcgacgatttctcatatggattctcaagctgaggcgatgagaagaatttcatactgtaatcttcttcaattccgtagtctgcgatggcgaataagagactcggcttagcggaggacctggtctggaacaacttcctgaagtatggactagcaaacattgatgcccattgcttcgacacgcaacgaaaccttgccactgactttgaagataatctcaacattatctcctggatgagataagttgttctgaaagatgaattcacgaagaaggaaagatctgttaaaaagtagtaagccctagaaaaaccaatgaacaaacgacgtagagaaaacctagcaatacgacacctagctccaaaactgggctaattttaaccttcaagtgggccactaggcactagctattggatcttcttgttggagtttgagcctttgtaaggaaaagttgggctttgtgtttttaggtaaatgggctgcagctttggttaaggacaagcaagagaaagtgtttctggttaattagcttgaggttgaagtttagttaaagtaaagtagtacaagtaagtgtgtgtgttgtgtaagattgtatccaagttttattatcaatgtagtcttctaaaattcttaaactagtgaactaacttttgtgagtgctttcaacatttatttcagtcatcttttcttgtgaagggggttttaagaaaccattgatcccacaaatttatatataaatttggtaaaaaaaaaaaaaaagagttctatgatttgtttgagttggaacatatatagaggttgatctgaggatgagttttggtgatttgattgaagcttttactgaacaagtttattttgaggatttgtggatttgcgttttagctaagttgcttgtgtacaatctctcaaacatgtccatttaattagtgcagtgagtttcacaataaacgttacagagattggtatgggaccctacatatgtgtatatataaacatacacatacagactgaaatgtgcactcttcgttttaattttccagcttcccaagaaggcttagttaaataactctcatctgcaatttgtgttaatggatttaattcataatgatgtgatctagtcgtaattgtttattgagtccttaagtgttagtggcaaataaactatgggctaaattctattttcatattattattacgataacgttaagaaaaaaaaatatattacatcaatgtagagagtcattgtttttcattctgtatacaagatgcagctaagatggttgacaaaaacaaataagcccaattaaaataataaaaatacagctttggttgttgatatatttaatgtactccattttaaaaaaaaatctttatatatcggccattaaatatctcaatggtctttttttttacaaagtctcaacagtagtttttattattatttacgtgattctgatcgataacattgcataatattataataacataagttgcagataaaaattcgtagaattaaaacttacgcaatgaaaaaccatagaatgaaattatttttaagatatgttgattagatacattttgcagaatgacaaaataaatatgatattaacaatatatacatagatatagatatatttatatttatttctatttaataaacaaaataaagattttaaaaaatttaataaattttgagtaattctcaatactaaaaactgtaagattattagagtttattaaaaaaatgtgaaaatgtttttttgtattattaacgatataatttttgtgtaaacaatatatttttttttttacatttgctaatatttagtatgtgtataataataacaaattattgtgcaaataaacaactatataccctttttgcataataaatttgtatttataactttaggtgaaaataaaaatcatgcgtttttgcgttttctaatgcaattatgcagattttttttattggcaaatttcttgtataatcgccttagaaaacgtcattataccattatgcgtgttaccaatcagaaccaatatcttcctattcatatatcaatcaaaggcatagagattagaaaacacaaaaaaaatactttttgtatagtttataaagtgttttaaagttcacatcagtttagattttttattttttattttaacatctttactcttatattagatggtataagggtaatacaaagtgttaaccaaccaagatggtggtgtagtataagactgaaacagagggtctcttgcatggacatgagatgctaaagcatcagctgcagaattcctttcacgattgacaaattccagcgaacaatacggcaacttaagcatccaatgacgtatgtcgtagatgagggtgccgagcagactatgatcttcaccgttgttgatcaatgtaacaagactcttactgtcgctttcgaaccaaacataacgcagtccatgagcccaaattacttggagtgcatggagaaacccgagggcctccgcatgtaatgaacaggtcgatgactgaagttttgcattcccacagagaactatatggccattacactcccgtattgtccacccagaacgtgtataagggctcccttgcgtatagccactatcaaagttacatttaacccatccttcaggaggaggattccactggctgctatctcgtcttgaggtttgtataggatttgtcgccacatgcacatttgtgttttccgttgtctcattggcattgagccattctgttgcatcttgaattcctttccttgcttcatagtccggcgattgacacttctgttgaaataagaacacgtttctcgatttccaaagtcgccacataatccaaaagggaagaaaccggtcaagagagtttgttgtttgtgttttgctcagctggatcaaacgatttagattgtcttcaaaggagcttggtggtccccattggttgccaataataatgtttgcactgcgccataccgactgggtatatggacagttaaacattatgtgatggatcgtttcttcttcaatacagcaccgttgacatattgggtccgcatcaatgtttcttgaacgcagtcgtgtatttgttgctagtgctcctgttacacatctccacaagaagtgtttaattttcggggcaacatggagtttccaaatcgcttgttttacttcagtcgatccaggtgggggttgtattgcctcctcctcaagaagatcctcatgtgttgcaacccaataacccgagcgaactgtatattcggcattttgagtgtaatctcattcaaacgtatcctcttccgcataaaaatgatagtaaaaagataataaaaatgaaaaagagaaataaagaaaaaagggcaaaattgtattaaagaatgttgaatagtgaaaaaaaagatgaaagtgtctcttttgaaaataatcttgccaaaagtatagcaaagtgaaactcactcaattatgaataacaaagtagcatgataattttataaaaaaaaatcacattaacccatattacgagttttgttctcatgttttgacaaagtgaaatggaggtttcacaaattagctaattatgttatttcagaccaaaataccattaacaaactacttttctttttttttgttacgtgtcttaacttttctacaaccaaactacatgaaaaaaatatattttttttccttaaatatgtataaaatatttaaaaaatcagaaatttaagaagaaaaaccgaaataattcaggaatgaaattgattttaattttatcctaaaatcaaaagaattattttcttaaatcagaaattttatggtgaagtaattgcttttgcttcattatcaagtagaaagattatagttagattaagtgaaattgtggagaaaaaattagtagtttgtgagatttgctatagtgagtttgtgggtttgagaggacatgactccgcgtattgaaatgtcattcattgaatggtgatactggatagataacaagaactaagtttcaaatttaaaaatatctacttttgactttctaatgaaatgtttcaaattttgaaaattccaagtctttttgacgttacatcgtctctatatatctcggtttttcacttaataagttccatatttttcacctatagaggaatttcatgacatctcttataaaacattaatgatttagtctaataaaccagatgaattttttttgataaaaagtgttcgctttaatatataataatgtatagatattacatcaaacgcacatgaacaatgttttcaagaaaaccaaacaaaaaatatatgtatatatatatatatatatacaacaacaacaacacaaaaatatatacataaagaaaaagtggtgcagacttacaggtacaactaacattttaaaagaaaacggataactcaaaggttgtcgacgtgtattgtagggtttcccttacttcaaatgtttactagaacatagaatataagcaatcctatccactgtggctaccaaaaatattggatacggacaacggatattgcacatacagcaaataggccgagaagcagaattgttgtgttgcaaactaatatcaacctcaccaattttgtaagtttgaccagccttataatattgatctgggccaagtaagcaattaatatgaagcgtggtgcagcaatctttgcaattatagaacccttcttttcctccaattgataactttccctcacataattcacaccaatctgagtcactcacctcatctccatgacaaaatgtgaggtaatgttcgtcatgcttgtaccttaccatgtatggtaaggttgcgcattcaaaacatataataaagtcacattcaatgcagttaagtaccttcttatctttcgttgacttgcaaatgtggcacattggcttatcttttgggtctaacgataggaataagggatgtcgatggccttgataattgaacggctcagcagtcgaggcacacactgcatctagtttaaagtaacaatttcggttataacacgaatatccgaaaccattactcttacgcatacaagcactgcatttgaagaaagcgtttacatgatcacccttttgtgtaaggggatggggatgtaatggatggacctttttacgtggagcatatgcacatgtttcgtgtaggatgaaatcacattccacacaaacataaatatttccttcgttgattggaaggacacacgcttgacaaaatttgtttccaacgtaaactccacttatgtcaaatttcagatgatggtgatgataaaaatggaatatttctccatcagctaacctcctgaaggactcaacgtcttctaattcttctggtacttccgcgagttctttaccatcccatatatccttacgtaatgcacatcttacgtgaacgacatagccactacacacattgcaagtgtatgcaccataatcactatcaaccatttgacggcaaactccacaagacttttcttcaaaaggaagggaagaaataaaagagacacgatggtggtgacgggatattcttatggtttgtgggatataaatacaatcactatgggctacgaaatcgcatatagggcaaacgtaggtgaaatggagtttatttatcaaaccacaaatattgcaggttaaggaagcttgtctagggaaaagggtgagagtatggtcatgtctttttggctggtctataaaaaagggtatttttgactgagcacaaaggacatgcatataactgtcgcaaagagcacaaaaataaatcatataggttgctctttttctacagtagatgcaatggtcaaatctatatttagaatagaagagttggagagaatgtttggtgtgggtaggataactaatctcaagtggacactcgacgcattctttgtggaaccttttatcacacgtggcacaaaaataatagtctgtaccgatggtttggatagagcaggaatagcactcatcgccttcttctgcttccggatcaacttctttgttgttgcaccaaaacagagggagtacatgatgattgttgctggtctcatcaaagagaggggaagaactgtacttggaaaggatatgattagttacctcatcttccacctcatcatcaagagaattcaataatatacgggttcggagtctagggcataagaaaagaggttgaggagggagatcgtagacggaatcaatggattgtttatcaaaggagtttgaggtttgtgtttgtggtaatggttttataacgttgcggtatacaagaaatggtttcccattaaattccactttatgaaattctccgaacaagtccatggctgctcaatcggagattcttttttttctttggtttaggatatatattgttattctccttcattccgatatatacagatgcatacacatagtagtcacagacatgacgttttactttccagcttttcatttgcaatttgtgtttttgaatttcgttaataaatattctaatacatcttaatgtacaaattaattaaattaactctctacattcatatacagctaggttgaaaaagccaaaacacaactaagctaataatacagctggttgatattttagttatttagatgaataaatattacaaattttattttttcactagggattggtcggctctacgcgccggttactttttataagcaagttttaatatatttaatactatcattgaatatgtgaacaaagtatagtcttgacatctatatactggtactataattcatgtgattttgttttagttttttttgtttttgaaattacatgatgtacttttttcaagcaatagattagcaagtaaaaataacggtgattacagtacattattttattttatttttccaatatggttaaccagaaaaaaatgagaagaatatgtgtggttatggtaacgtaaagaactatggttttatacgcacatattgttttactttttagaataatagtaatacaacaatttctatatataaaatgaaactaaactaaagaatgtaagaatcttaataagaaaaagctgaagagaatgagagttgcatgcttatcttaagcagctgatgtgtataatggtggatcaatgaacgtttgaagcctgaaaccttgataatgaacgccatatgtaagatctcccttaaaccacagtatattattggtcacaacatgcttggaagtgcatatatataaccaaacggaaccctcctcttctgatatatattcatatataatctttttgtgctttaagaaacaacatttatcatttttgaagatttgcaggagaaatatgaatatgatccatataatagatgcatctcgtcaaaagttaaacatataaaaaagacctttaatgacaattaatttactttgttcacttacatagtgaaatccttgaccatcacatatcatgcattcaccaagtttaagacctcagaaacctaaattttactctgtttctactataatgagaatctagaattgataacacctaagtataacacatgggagaatcaatagatgaaaaccaaaacgtgcacatgtcgagacaaccttctagagtttacctcctccaaactgctgccaaggtagtctctggtttccattgtaagcctgcaagtcataatatattcatataacatgaaggaacatattatgattgcaacgtcaattcccaaccatgaaccacagaaatatttagacgggcgaaaagaagacatataccttaagtgaagaagttagagagttgtggccatatttcatgcatatacagaaatcacatttttttttttgttaaaaggccttatacagagataacatgagtcatgctatatatctcgatttaataataagacgtaaagaacaatttgtctcacctttgtcagtctatcattattaaatgcagagtttagaaatattaggatgaagtgaacgatgaacgggaaggtgatcgtatttttgaaggagaggcgactattagagagtcgatttgggggagatgaattggaacgtaaaacccttagagaggtatgagatgtatattatctaagagggaaaccaaaacgttgattacattattaagaggcccaaagccttgattattagtaataaattaggctaatgtggctgggtttagaaacattgcgagcaaaattaggctgatgtggcagcttaatggaaaagattagaaagctgatgtggctagcctgagaagcctcaatgaacttcttttattagtaagaaatgtaatcttctaaattcttaaacgagtgaactaacttttgtgagtgctttcaacacttatttcagtcatcttttcttggtaaggggttttaagaaaccaatgatcccacaaatttatatataaatttggtaaaataaaaagaaggagttctgtgatttgtttgagatggaacatatatagagattgctctgaggatgagttttggtgatttgattgaagcttttactgaacaagtttattttgaggatatgtggatttgcgttttagctaagttgcttatacaatctctcaaacatgtccatttaattagtgcagtgagtttcacaataaacgttacagagatgggtatgggaccctacatatgtgtatatataaacatacacatacagactgaaatgtgcactcttcgttttaatttttcagcttcccaataaggcttttagttaaataactctcatctgcaatttgtgtaaataattaatggatttaattcataatgatgtgatctagtcgtaattgtttattgagtccttaagtgttagtggcaaataaactatgggctaaattctattttcatattattattacgataacgttaagcaaaaattaaatatattacatcaatgtagagagtcattgttttttattctgtatacaagatgcagctaagatggttgacgaaaacaaataagcccaattaaaataataaaaatacagctttggttgttgatatatttaatgtactccattttaaaaaaaatctttatatatcggccactaaatatctcaatggtctttttttttacaaagtctcaacagtcgtttttattattatttacatgattccgatcgataacattgcataatatcataataacataagttgcagataaaaattcgtagaatgaaaacttacgcaataaaaaaccatagaatgaaattattattaaaataggttgattggatatattttacagaataacaaaataaatattatattaacaatatatacatagatatagatatatttgtatttatttatactaaataaacaaaataaagattttaaaaaatttgttaaattttgagtaattctcaatactaaaaactgtaagattattagagtttattaaaaagttgtgaaaaatatttttttgtattattaacgatataatttttgtgtaaacaatgatattttttattttacatttcctaatatttagtatgtatataataataataatcattatgcaaataaacaactatataccttttttgcataataaatttgtacttgtaattttaggtgaaaataaaaatcatgggtttttgtgttttctaatgcagttaagcagattttcttgattgacaaatttcttgcataatcgccttagaaaacgtcattatgtcattatatgtattaccaatcagagctaatatcttcctattcatatatcaatcaaaggcatagaaattagaaaacacaaaaaaaaaagacaaaaaaaaaaacgttttgtatagtttatagagtgctttagagttcacatcagtttagattaaccaataaaacattcgaactatcaattaatctatcatatgcgacatctatcatatgcgactgtatcaatttcgactgaatctcacagcccaactacagcatataaaaacgctacgtttgatcgatatttcactcaattgccacatttttaacaatatattttcgtaagcaataaagttttgaccaggaaacttaacaaatccttttcaaaacaatattgaaaaccaatttggagagactttgaatatctttttagcacaaaaacaaaaacaaaaacaaaaacaaaacaataatactttgctttgccaaaaaaaaaaaaacaataacacttttaaaggtggtattagaaagaatttaaaaagttacaaaatataaacatgttaattcaaccaagaactaacgaaacaatatatcctctctttagacctcatctttctctcccttccttatatatggatcagagggatttccaatgtcagcttgaattggttttgtattaagcgattttatgacatatgcatctattaaaattgtgattttgtagatgcaatcgtggtgtaattgtgtttagatgaaaatatccttttgaaaaatccaagtcttttattaggaataggactaaaaagctctaacagaagagtggctttttctgttacatcgtactatataatctctggttttcactttacaagttcaataattttcacctatagagaaatttcacacatctcttatcagcatttaaaaatttagtctattaaataagatggattttttaatataaaagttaatgctttaaatacataatcaacactttaaaagtgttaaaagtctctcatgtgcaaacacatcagctttttaagtgaacctcagcttgacatctctgcaaaatcaacaaccaattagaatattttgattaatacagctcatttacttcaaccaataaaaacatactattttttcatgtcatctcatcaacttaacaaaattaaaattacacatgggtctaacccaactaaactactttcaaaactaaaatctatataaaaatatgggcctaaacttcctaatctaaaagacttaggcttagacaaataaaccgaacctaatgtactgaaccaaaatcaatgcaaaaaaaaaaaactcaaaccaaatcggaccgaaaatatgaaaataaccgaatagatattaaattctataaccgaaagaaccgaacccaaatggatacaaaccgaaatattttgggtaaccgaaaatatccaaaatataattatactttcaaaaatattagttatttctagaataaataattaaaaatatatagataatagtaatttccgagaatattcaaagaaaaataaccgaatgtataataaatttcaaaactgaaagaaccggaaccgaacaaaaatttcaaaataactgaatgatactaaactttataaccgaaggaataaataaccgaatgagtacttaccgaaactgaacagataaccgaatgcccatgactaagaaaacttatctaagggcctgactggttgaaacgcagcggttacggttgtgattgcgagagtttacggaatcagagggttgcggttttaagcgttataaatttgaacgacttgtttagcagttaaaaattggtgcatttgcgggagctttatgactggttaacggaattacatttatagtagaaaaattacgggtgtacttttttgcggaaaaattacgggcttacgttttttgcgtaaaaattacgggtttacgttttttttgcgggaaaattatgggtttacttttttggcaggaaaattacggatttacgtgttttggcgggaaaattacaggtttactttttgggacaaaaattaagagtttatgtttttaacggaaaaattacgactttatgaaaatgttattatcatgatgatagctattatgactatgatatatttatatgatgatgatgatggtgatagtagtatgatattatgagagggtaataatgattaaaggcctcgctgatttaaacatagcgtttgcggttatgaataaaagagtttgcggaagcggacggttgcggtttcaatcgttatgaaatattttgaaccactgatttaatggttaaaaattggagcgtttccaagattttataactggttaaccaatgggtgatattacggtgaaatgaaaaataacaaaaaataataatatataattatacaaagtataaaaataccaaaatattatattattatgataaaatgtgaaatttaaatataactaataataaaataaaatccttcctaattattgaaactaattaaattttctactcaaatattcatttggttcataaaacaaatcaccaaataatatgcaaattataaaaaagaagaagatgacaaactaaaaaaaatattttcaattttgtatcttccggattaataatattattataatacttagttagtatcttatcattcttcagtttggtttgatgctatggttttaatagagaaaaaaactagcgtttaagataaatcaccaacatatatggaagttttggaaaagaagcttacgctgaaaaatgttacaaatgacattgttgatgtaatacgaaacaagcaaaaaatggttataactaagatgtcatttttgttcttcaacatatgaaaaacattaaaatcaaagatgataactccgtataacatattcttaagaatcgaaaatgactttaacctcatcagaattagcacatggtgatttttaactctttttacttttgtttttttaatgactcttctaaatagatgttcgtaaagcaaaaaattagcttctaaaacttataaaggctatattactaaaaaaattcaacaaatgcattgtgttcacaatcactttcaaatgaatctttttattctacatatattatgacaaatgacattcaatacctacatacaacttaacaaaattacattaaaaaaaaaactcgcggcttggcgcgggtttcggcctagtaatgtataatagatattacatcaaacacagacaaacgaggttggcaaaaagaaccaacaatacatattagaaaaagcgttggaggtacacctagatataataatctcgaccttttactttctagttctatatttttcacctatagaagaatttcactgtattttaataaaattcaatgatttagtcttaaagaatcagatgaagttttaaagcataagttaaaattttaagtatatattgttaaaccaaacacacataaacagggttaacaaaaagatccaaccaaaaatacaatatattacataaagggttgcaggtgtacatccaaaataaaagtaaaaagacaactaaaattttaaaagaaaagggataactcaatgatggtatctcgtcttcaagtgcttactagaacatagaatataagatataaacatatcctttatgtatgaaacaaatgttggatacggacaacgaatattgcatatcgagcaaaaaggccgagtagtataattgttgtgtcgaaaaaaaatctcaccgttaggaactgggagcctttgaccaaccataagatatggatctgggccaagtaagcaattaatatgaagtgtcgtacaacaatctttgcactcatagaatccttcttttcctccaattgctaactttccctcacataattcacaccaatctgagtcacttgcctcatctccatgacaaaatgtgaggtaatgttcatcatgcttataccttatcatgtatggtaaggtggcgcattcgaaacatacaataaagtcacattcaatgcagttaagtaccttcttatcttttgttgacctgcaaatgtggcacattggcttctcttttgggtctaacgataagaataagggatgtcgatggccttgataatcaaacggctcagcagtcgaggcacacactatatctatcatgtacttgcaattgtggttgatacacctatatccaaaagcagtactcgtacgccaacaagctttgcagtggaagcaattgtcttcataaaaaattagtttaaggggatggggatgtaatggatggacctttctacgtggagcatctgcacatgtttcgtgtaggatgaaatcacatcccacacatacatacaaattcccttcattgactggaagggcacaagcttgacaaaacttgtttccattgtaaactccacttatctcaaaatacagatgatggcgatgagaaaaatggagtattactccatcagctatcctcttgaaggattcaacgtcatcttcttctacttcttctggtactccttcaagttcttttccatcccatatatcactacgtagtgcacatcttatgtgagcgacaaagccactacaccctttgcaaatatatgcaccataatcactgtcaagcatttgacgacaaactccgcaagacttttcttcaaaaggaagggaagaaataaaagacacacgatggtggtgacgagatattcttatggtttgtgggatatagatacaatcactatgggctacgaaatcgcatatagggcaaatgtaggtgagatgaagtttatttaccaaaccacaaatattgcaggttaaggaagcttgtctaggaaaaagggtgagggtatggtcatgtctttttggttggtctataaaaaaaggtattttcatctgagcacaaaagacatgcatataactatcgcaaagagcacaaaaataaatcagataggttgctctttctctacagtagatgcagaggtcagatctatatttagaatagaagagttggagagaatgtttggtgtgggtaggataactaatctcaagtggacactcgacgcattctttatggaaccttttatcacacttgtcacagaaataatagtctgtaccgatggattggaaagagcaagaatagcactcatcgccgtctactgcttctggatcgacttctttgttgttgcaccaaaacagagggagtacatgatgaccgtcactagtgtcatcaaagagaggggaagtattgtgcttgaaaagaatttgtttagataccctctcaccaaccctcgcattatcgatatcaattgataatatttcggttcggagttgagggcataagaaaagaggctgaggagggagatcgtagacggaatcaatggattgtttatgtttggtaatggttttataacgttgtggtatacgagaaatagtttcccattgatttccaccttatgaaattctccgaataagtccatgactgctcaatcggagattttggtgtttttttttggttggtttaggattgatactggtcttctccttctttccgatatatacacgttcacagagatgacgttttaatttttccagctttctttgcaatttgtgtttttaaatttctttaataaatagtctaatcttaacgtacaaattcattaaactaactctttacatacctacagctaggttacatacctacaatttattaatatttatccttataaaaaaatattaaaactatcatgagacgagttgtatagcgggacggatttgattgatataacacgagttaaatccttatttattattttatcatcaccaatttttttatttacaatattaatataaaattatataattttaatactaaatttaaaaccgtaaaatttaatattattatatataaataaaatatttgtcccgtggtataccacgggttaaatcctagtatatatatatatataaacagaaacagttttaaaagtcatgaatttatatagtgaggaggaagatttaattacatacaagtatatttatcaaattataaaggcaatatattagtactcaaaaatatataatatatatatatatatatatatgttcgatttaaagataagtaaattacacgaagaaaatcttgcaaaaggtggacttcaaatgatctaatcaagtagaactagttggaccggttaaaattcgactgtttgttggctttttacgtgtgatagcgtcaccaaattaacgtcttatccggctattacccggttcacaatcggatttcgtgacgccacccgattaatcgcaaatgtttcaattaacattgccaaagaaaaacgaaaatatacaccaaaagttttacttgaaacaatgaaaggtagtgttacacatagatgattaagttctttaataaataaaatatgtgtcataggacattatatataattcatgttctgtaataattttatgaaatgatctaatcgtgattgttaattggggcatatagcttcagtggcaaataaataacttatgggttagctagctaactaaatgattaaatgctatcttcacaaatcacaatgtacaataaagacggaaacaaactaatcatcttaatgtggtacataattaattaactatagtagcctgatatacaactaaggtgaatttataaacttaccaaaagtctcaaaagtctattacttgaaaatgttgaatgtcaatgttacgaacttacctaaagatacaaaaatgaaaagacagaatttcatatgataagatatgaaccataacgtaaaaataaaaaaatcaaggtaaaataactaaactaatataaggtagcaaacaactaaactacaacacaaataactatttagtcattatagagtgatgaccattgaccattaatttaaaaaaaaatagaaataataaaagtaaaataaaagtagtaattgatttatttaaataaataattttataattttatttttattttgaaaaaatagttaaagaaatgaattaatggacgatttaacagaatatgaaacttttgattttctctcaattaattttgctgatttttaatttaattaatgttaaaggacacatgtcattttcttgtgtgatgatgtgtcatccatatgaagagagttggccaactttcatatatacgattaagtacagctaagatggttgatagactttagttatttaattttctcaacagtctttttgtgtttctaaaaaaaaaatagtcattgtgtgttatattaattcaagatataaaacgatgatgtaaaaggacttttacttttcacgttcggtatcagagatctttgttgtatatcactactgcgtaaaagtactaactcatcacgtatacccggagattatacctaaaataacagaaatctaattttaattttgttccatatatcggttgaggaaatttacaacttagcaaattaaaagggcagtgtatatctaggttgcatgaaaattcgctcttagatctgttttatatttcgaaacatttcggaaacagaaacttttcggaaatacgaaaatcgtcacgaaaacatattttttaaaaatttatttttggaaacacgatagaaactcaagtttccaaaatagaaacttatatttctaaaatagacatacgacaaatattttttattgacttaaaaaatttaataactaaaactggaaatatgagttcgtacccaaccgctttatattaaatttgtaaacaacatttctcaggtttggctcgtttgagccctaattaattttcggattacaaaaacaaaaaaaatagaaatcttaaaattattaatacatataactaattttggaagactctcagttttaagatatttcttttgataaaccagatttgaagagagatttaaattatctttgatgaaagtaatgaaaataagaataaaaatgttggtctaaattaaatatttgaacttaaaccttttaatctttatctttagagttttagttaacttatttaatattgatagtttagatttgtatggtttaaaccattttttcttcaatctaattttatgttaatgttatatatatatatatatatatttgtatacgtttccaaaacgtttctaatctctagtttaaaaaaaaatcgtttctcataagaatttcattcataagctcgaatatttaattaaatttaattagttcaataacatatataaaggaaactggaaaatggtagacttcgaatgaactaagcaattagtatccacctagctaatggggccaatccttaatcgtgacgccaccagattaatcgaaaatgtaaaagtcaaacaaaaatgttgcaattaatcgtgacgccaccagattaatttttttttatagtatatagaaataatgaaaagtagtggtagcgataccgacttggctggccttggttggatgattaagttgacttctttatcagtcgttgttaaaaatctaatataaggcacatggatcagtttattgcttattgcacatggataattaatgtctctaataaaaaaatgtgccataggacattataattcatgttctgttttattatatagacgtagagaatttggtagtcgttatatatttagtcgttgcgctttctaatcacgtaacgtgacgatttataatttaaatttactaactttcctggccgttgtcgaatttttacaacgttcggatttttttactgtggttaattaacttgatttgacttgtaatccgacgaaaaaaagaaaacgaaaatgggctttaacattaaaaagccacacaacaaaaaatggttattactcgaatgtgaatgcgataagtgaagtatggatatgaagcaatgtgtggtcggaggaatatggttcgcaacgagagacaacaaaacgccaaatcactagttttgcttttgagctcttttaccttttgatctaaactctaaaccaagttgactaatggctgcatatattgtaaaacaaatttttttctttgaataaatttaatatttttctaaaaaaaacaaaaaacaaaggcaacatcagaaaaaatcatcacaaaaattcatcttaaagatgtatcctattcctacgctcactcatgttttggaaacgttcgatcatcacaaaccggcatagataatattttgtggatgttcaggtggaagcaagttgtagaaataccgaatgtaaagagctaagaccagagacgaggcaactgagtgtagtcggtgcggttagagttgcgattaggaggtcgttggtggtggcatgctaatatacgcccgaaagaatgcgtctgagaaagttagtctagaagagtatgaagtgatttggacctacatcttttctatatgtataatcaatgtatgtgaacaaagtctttcagttttgttagcaagagtttgtgttctcaagagaacgtgaatttgggtatttgaaattggtcattacttgaatgcggatagagatgtcaaaaactagtgagaactgatttgaagatataatctgacgtcaacttaatcatattaatgaattgagtatgtagatgaagtgtttcgaatttggaaaaattatgtcttttcgaagttacagtctctatatgatctcgttattccctccacaaaatccatatttttcacctctataaaagtattttacgacattttatatacagtaaacgttttatataattaaaaggaacgtaaacaatgaaaaggtttaacaaacaagaagcaaaaaaacaaattacatattaaaaaagtgcagatacacttagttacaattcaaatttcaaataaaagggatttctcaatggttgttaacatgttagagcacacctaatatgagaaaccatttcctttgtgtatactgcaaatgttggatacggacaacgaatattgcatttgctgcaaatttgacgagatgcagaattgttgcgttgtaaaaccacctcaatttgatccgttgggatagtttgatcaggcttcaaatatggatctggaccaagcaagcaattaatatgaagcgtggtacaacaataagtgcacttatagaacccttcttttcctccaattgctaattttccttcgcataactcacaccagtctgagccacctgcctcatctccacgacaaaatgtgaggtaatgttcatcatgcttataccttaccatgtatggtaaggtggcacacgtaaaacatataacaaaattgcactcgacttcaatgcagttcaatagtttatgaaccttggttgacttgcaaatgttgcaaattggcttttctttggggtctaaagctagaaataaggggtgtggatgaccttgataatcaaacggctcagaaaccgaagcacatactacatcaagaacgcagtcacaaccctctttgtcacactcatatctgaaactattacttaggcgcttacatgcaagataggagaatccacgttcaaggtcagctgtagcaactctttgtttaagtggatggggatgcaatggatggaacttcttgcggggagcatctgcacatgtttcatgtaggatgaagccacattccacacatacatacaaattcttctcattgattggaaggacacacgcttgacaaaacttttcttcgccgttaacttcataggtcgtaagtttcaattgacaaccatgagaaaaatggagtattattccatctgatatcctctcgaatggctcaacttcttcatcttcttctggtactccttcgagatcaatgccatcccatatatcgagtcgcaatgcacatcttgtgtgaacagcgtagccgctacaaatattgcaaatatatgcaccataatcaccatcaatctctttgcggcaaactccacaagaccatattcctaatggaagagaagaagtgaaagagatacgatggtcgtggcgagacattcttatggtttgtgggatatggatacaatcactatgggctgcaaaattgcatatggagcagacgtaggtgagatgaagtttattaactaaaccacaaacattgcaggttaaggaagcttgtctagggaaaagggtgagtgtatgatcatgcctttttggttggtctatgaaaaagggtattgtcgcctgagcacaaagcacatgcatgtaaatatcacagacatcacaataataaataatattatgtgcctttcttgagcacaagatgcaatgctcaaatggttttgtagaaaggtaaatttggagagaatgttgagggtgggaaggataagtgatctcaagtggagactcaacacattctttgtggtacctttcatcacacgtgacacagtaataatagcatgtaccgaccttatcgccttcgcaaaaaccgcaatccatgtctggatcagcttctttattgttgcaccaaaacagagggagtacgacatgataatatgacgtactgtcaccatggagaggggaagtcttgagcttgaaaaagaggtcaagtaatatacccccatcttcacccgagactgtaatattatcgacagtcgctgttaatcgatatcgtaaatcagggcatatgaaaagaggtgcaagagggagattgtcgccggaatcaatggctatggagtttaaattttggattgataatggattatcgatggtggttttttcatcagaggagtttggggtttgtatttgtggctttataacgttttagtatacgagatatggtttcccctcgatttctctcttctgaaattctccgaagaagtccatggttgctcgattagagtattttttagggttttgggatgttgttatccttcttgcccctacatatgtgtatatataaagactgaaaggtgttgtcctcgttaagatttcacttttagcttcccaaggattaaacaactccagtttgcaatttgtttgatattattttagaatgatatgatctagtcgtaattgtttaatgactcatatagtagcaaataaactatgggcgctaaatgctagctaattttcacattattattacgaattaagttatattaatgtagaagtcatttttgttatatattacagctacgttaccacgttgacgttggttgacaaaaaatacagctaagctgaaattaaaaataattaaatccaactaacgttagtttataatatttactgtaatagttttgactctgtttcaaaaagtatttaatgtaatatataatagaaaaatcatatatataaaagttgaccaactctctccatatgaatgacacgtcattacacaagaaatgacatgtgtcattttatattttttaaattaaaatttaataaaatttaataagtaaattaaatgtatcatcaatactaattttaattgatttcttcaaaataaaaataaaaaataaaaattatgttaataaattaagcactacttacattatattatttttattttactaattttttattatcaataatcactattttaatgactaaaatgttttgcattgaagatgtttgctacctaacctcttattagtttagtaattttattttgagtctttgataacattaacattcaaattttttcaaataataaacctttgaaacattagacctaccaaataatttaatacatgattatttctcttatatggatatatgcaatgagagaagatctaaaagtattgacttaaatgatattttaatttttgctttctttttattttttcatatgaatacgcttgaaatcttgtttagtttatatcaattttatatatttaatcatgagcttataacaatgttgttgattattatatcaagagaatatataagaccagaaatagtttatttgtaatcaagttagacaattttcaaatcatccaagacatgatcatttttctaatattgatatatgcaatgatagaaaatctaaaattgttgacttaaatgatattcaatttttgccatcttcttatttttacatatgaatatttttcagatcttattcagttgatgtcaatccaaactttaatcatgaacctatcacaatatcgttgaagtacataaaacaaggaattgatttatttataatcgagttaagcaaattttaaaccacacaagtaacataattatacataattctatcagaatatcagatattgttgttatatgtattcatgaagtgaaaatattaaaattttataaataatcagctttataaataaattagtcacaaatgaatctaaccataaaaattataagtacatattatggatctaattttattaacaatacaagaataaacaaagaataaacaaaaattagcaaaaataacaatcaatgtaaatattttttttaacaattttcaaaataaatccacgcgtagcgtgggtactcatctagtattaatggatatgcccagaaaatgtgaaaactagattttaccattgataattcaatattgggtaagtatgtaagagaaaaaaaattaaagtcataactgtcttttttactttgtttaatttaccaaatatgtcgtgtataaactattgttataatttcactatatatcaaatattttaccacatttatataaaaatattattcaaatatttaatatgttagcacgttatattcagtataatatgttattctaatttgaatttgatttttttttttttttttgtcaaccgaatttgattctttcatattaatttgtataatatggtaaatggtttaatacgttatatataaatttatcgtgatactatactagttaacatgttaatcaaacatttatctgtatctagcacgatatcatactagttaacatgttaatcaaatagttatctacataaaccataaatattttatgcaatccaatgatgaatagtgttgtaaattttggatgaatagagttgtcaggtatatgatgaacagtatcatgcctaaagtatccggtaataaataatgttgtgagacaatggcaaatttggtaaattaaataaatagaaaagatatttatagttttaatttttttctcttttattcttacctaatattaaactatttatagtaaatatctaattttcaagtctttcaggcatatacattaatatagcccataataatatactctcttcatttcaaggaatgtttaaggtttttactgtattacattatttaaatgaaacaatttttctctcttgtaaacatcatttaaaatgatacagattgagtattaatatttagctcaacggtctttttgtattataatttacatgatatcctacatatatgaatcgaagggatagagatttcattaagaaatctctagtaaaaaactttcggtatagtttatagagagtatagcttcattgatagtaggatatcttcattgagacattttggattgcgatagtatagcttcattgagcgatgaggccaattagactaataaatgaaccaaaatttgtttatactttttttaactcaaggatgtgttaaatcgtgtgagagttgacttgagacaatgagaagtaaagctctagcacgatataacatttctcattatcaataaacaacaatataatggaaagtagtgctatactgaattggatggatagttgattaacttgacttcttattggtcgttcgtaaaatccaacatcgttagtgtgatcgattctaacatagagtataatgtttgtttgttctttttgtgacaccaagatctaaatattggtaaagcatatttgtttaagtactttttaatatctatttaataataaacaaatgtccaatcggaaatggataaattaaatttcgaaatataagaaaaattaaatcttaatttattatataaaaaaacagacgaaatattttatattaggtaactaaaatgataataaaaagataataaaaatgaaaaagagaaataaagaaaaaagggcaaaattgtattaaaaaatgttgaatagtgaaaaaaaaagatgaaagtgtctcttttgaaaataatcttgccaaaagtatagcaaagtgaaactcactcaactatgaataacaaagtagcatgataattttaaaaaaaaaattcacattaacccatattacgacttttgttctcatgttttgacaaagtgaaatggagctttcacaaattcgctaattatgttatttcagaccaaaataccactaacaaactactgttctttttttttgttacgtgtcttaacttttctacaaccaaattacatgaaagaaatatatttcttttaggaaaaatgttatttaatacctgaattttcaaaaaatggccaaattaactgtgaactcttgaaatggtcgttttatacctcaacaaaaaattgacttctaatttaatctataatttatcgttgacttctaatttaacctataatttatcgttaacccgaccaaatcgactcaccgttaacacttcttaatagcgctcctaacagccattacaaaacatggcctaacagccgttgtcgttggtttaaggacgaaaacaattgttagttacgctgttaggagagctgttaagaagtgttaacggtgagtcgatttggccggatcaacgataatttataggttaaattagaaatcaactatttgttgaggtataaaacggccatttcaagaattcacggttaatttggccattttttgaaagttcaggtattaaataacatttttccctatttcttttccttaaatatgtataaaatatttaaaaaatcagaaatttaagaagaaaaaccgaaataattcaggaatgaaattgattttaattttatcctaaaatcgaaagaattattttcttaaatcagaaattttatggtgaaatagttgcttttgcttcattatcaagtagaaagattatagttagattaagtgaaattgtggagaaaaaattagtagtttgtgagatttgctatagggagtttgtgggtttgggaggacataactccgcgtattgaaatgtcattcattgaatgttgatactggatagataacaagaactaagtttcaaattttaaaatatctacttttgactttctaatgaaatgtttcaaattttgaaaatccaagtctttttgacgttacatcgtctctatatatctcggtttttcactttataagttccatatttttcacctatagaggaatttcacgacatctcttataaaaaattaatgatttagtctaataaaccagatggatttttttgataaaaaaagtgattgctttattacacactgtaaacatattacatcaaaagcacacgaaaaacgttgacaaaaaaaacaaacaatatatatatatatacaacaacaacaacaaaaacaacaacaacatattagaaaaagcgttgcagaaaaaatttaaaagaaaacagataactcaatggttgtcgacatgtattgtagggtttcccctacttcaagtgtttactagaacatagaatataagcaatcctatccactgtggctaccaaaaatattggatacggacaacggatattgcaaaaatagcaaataggccgagaagcagaattgttgtgttgcaaaagaattgcaatttcaccaatttcgtaagtttgaccagccttgtaatatggatcaggaccaagtaagcaattaatatgaagcgtggtgcagcaatctttgcacttatagaacccttcttttcctccaattgctaactttccctcacataattcacaccaatctgatccatttgcctcatctccatgacaaaatgtgaggtaatgttcgtcatgcttgtaccttaccatgtatggtaaggtggcgcattcaaaacatataataaagtcacattcaatgcagttaagtaccttcttatttttcgttgacttgcaaatgtggcacattggcttctcttttgggtctaacgataggaataagggatgtcgatggccttgataattgaacggctcagcagtcgaggcacacactgcatctagtatgtagtaacaagttcggctagtacaatcatatccgaaaccattactcttacgcatacaagcactgcattggaataaagcgtctccatgatcaacctttagtgtaaggggatggggatgtaatggatggacctttttacgtggagcatatgcacatgtttcgtgtaggatgaaatcacattccacacaaacataaacatttccttcgttgattggaaggacacacgcttgacaaaatttgtttccaacgaaaactccacttatgtcaaatttcagatgatggcgatgagaaaaatggagtattactccattagctatcttcctgaaggactcaacgtcttctaactcttctggtacttccgcgagttctttaccatcccatatatccttacgtaatgcacatcttacgtgaacgacatagccactacacacattgcaagtgtatgcaccataatcactatcaaccatttgacggcaaactccacaagacttttcttcaaaaggaagggaagaaataaaagagacacgatggtggtgacgggatattcttatggtttgtgggatataaatacaatcactatgggctacgaaatcgcatatagggcaaacgtaggtgaaatggagtttatttatcaaaccacaaatattgcaggttaaggaagcttgtctagggaaaagggtgagagtatggtcatgtctttttggctggtctataaaaaagggtatttttgactgagcacaaaggacatgcatataactgtcgcaaagagcacaaaaataaatcatataggttgctctttttctacagtagatgcaatggtcaaatctatatttagaatagaagagttggagagaatgtttggtgtgggtaggataactaatctcaagtggacactcgacgcattctttgtggaaccttttatcacacgtggcacaaaaataatagtctgtaccgatggtttggatagagcaggaatagcactcatcgccttcttctgcttccggatcaacttctttgttgttgcaccaaaacagagggagtacatgatgattgttgctggtctcatcaaagagaggggaagaactgtacttggaaaggatatgattagttacctcatcttccacctcatcatcaagagaattcaataatatacgggttcggagtctagggcataagaaaagaggttgaggagggagatcgtagacggaatcaatggattgtttatcaaaggagtttgaggtttgtgtttgtggtaatggttttataacgttgcggtatacaagaaatggtttcccattgaattccactttgtgaaattctccgaacaagtccatgtggctgctcaatcggagatttttttttctttttttttctctttggtttaggatatatattgttgttctccttcatcccgatatatacacatattagcaaaatattataatttatatataagttcatatgttcaatttaaaaataattagttacacgaaagaaaaaaaccttgcaaaaggtggacttcaaatgaactaatcaagtttgttggaccgaaaaaaaagtttgttggcttgttacgctcatgtttagtgtgtagcgtgacgtcaccagattaatcgaaaatgtatagtcaaacaaaatttttgcaattaattagtattgtcaaacaaaaacgaaaatatactccaaaatttgattcgaaacaattaaaagtaatggtagcgttaccgaattggctggccttggttggatgattaagttgacttcttatatcagtccttgttagaaatcctgcgtcgttgatgagatagattccaacatataatacaaggcacatggatcagtttattgctattgcacatggatgattaagttctttaataaaattgtgtcattggacattctaatccatgttctgtaatgatattatgaaataatctaatcgtgattgtttattgaagcatattagtggcaataaataacttattagattttaaaatccggtatactgcaggacgatttatttttaaaagtaatatatattaaaacttgcaaattttatttttacaaaatatttatattttacagtttataattattattaagtaacgatatactacgaattcatgagacaattgttaaaaaaaactgaaattttgactcctattaaaacagcatattaataatattttaaaattttataaatattgattcaaatacatccactatataacccaattccaaaataaaacacgttctgtaatttttttatccgtcccatgatttttttttaaagtagtaatttttaaaatttaagaattattttttatatataaaagttttgcaattgtatcattctctaatacatttatattttatagtttaattttatatatagtaacattatacataccacataacatttttagttttatataatttttctaaattaggatgatttgatatgtttaatattagtggtcttaaaaaataataaattaaagatttaacccatattgaaacggtggattaattatattttacttttttattaatgttgattcaaaaacccgtccctcaaaatccgtcttgccaaaaagtcatttattttattaatattagttttattaatgatatgactctgaattataatctaaactagccctgggcattcggttaaccattcggtttcggttcggttgcgcatggtttcggttatttcgattatagtaatacaagaaccatttggatatttgaggaattttggttcggttcggttatctttcggttcggttcggttcagatattaaacttggtaaccataaataacctaaaaccgaaataaccgactaaaaacctgaacaaccaaaaaaattgaccaataaccgatatagaacgtacgtaaaaaagacatattcacaactcacaaagatgcaaatatggtccattcacaactcacgaaattcaacttgcaaactaataaagagaagaacatagttaagtgtcaatacatacaatatatatgatatattatctatcatacatatatgctttggttatcctttggttatcggttactaacgtaaccgaaaccgaaaccgaaatctaagacatataatatccagccggttattttaagctatccaaacccgaaccgaaccatgtttttcggttcggttcggttcggttaatcggttagcggtttttttgcccaggcctaatctaaacattttagctaataacataggagtgcaccatatttatttaataggggaatgtaccatatgacccgaatgcatttttatccaaatccaccaaaaaagtcttgcaaaaatactatagagataagaaacgatagtcgattttgatagatataagattagcaaatatattagttagcttaaattagttaaagaatacaaattaaaaaggtatattacactttattcaaatatagtatcaaaacttatataacacagagatttgataattttttaaattgttgaatatattttttttgtgctactttttatgtgattaagatttaattaattttatatataaaatattaaattgacttatttgtttataatttagtaacagatagatatttgaatttttagtatattttgcttcagtttagaaaatctttgatgacccgtctttagatccaataagccctataatctagagattaatctgcagtataccgcaggtaggcttatattttagttaaattaaaaacttttattgtaaagatgatttaaaatatatgatattattttatttgactttaaactatgagttgtatatgttttgttgatattatctatattatttagtgtttaagattatacacttgtagtttgattgttaatttaagagtttcacatgtagtataccatcttatattaatatcgatctaaacccgtcaattctaggattttccggcttgtattaaaaattgaatcacatctaatatgttattaactattgtagtatataagattataaattttcaatataatatgtatgaaatttaatacaaatatttcaaatttatgtcccgttactcagtagaaagttttcttaaatctatttttcacccgttataatattatttcatgtattaaacagtttatattcgtttttaaaattcaaattatggcatatgcgaaaaaactctaattatttttttataatgatgatattattttttcgtaaaaatagaatcatataaagatgagaagtgaactataataattaataaaaaaaattaatatgataatttagataccaaatataatttgttgattttaattggttagttttttggaaattaataatgtatttcgtttttctaattaaattaaattaattaaaatttagatatcaaatcttatatgttgattttgattggttattatttttggaaattaataatgtatttcgttttctaattaatttaattaattaaattagtatttgactttttaatcattaaagagataaattaatttactttttaaaattttatttttaattgcatacttatataattacttacaaaaattaaggttatatttaaaatgtattttctagataatatagtaggatgggctaaatggctaactaaatgctatcttcacaaatcacaatgtacaataacgacggaaacaaactaatcatcttaatgtggataaatgagaaattttactgtcaaatcaatttagaaaccgagtgatctatattatactgaaaattgtaagttgaacatgcatgttcatctctaatgattaaaagacagcatgtcactattatacaattcactttgtttcatataattattgtgacaatagtatcgttttaaaagtaatttataattttttaagttatgtataaaaaaacatttaaattttttgtaggtgatatatacaagtagagaatttgaacgttgctggtattagccacgtgatgattattagtttaaattttcttataatcatgaccatttaatatttactacgttcggatttcatttaatcatgaccaaaagaaatgggctctgaatgggctttttaacactaaagctacatgacagaaatgggcactattgtgcttcttttaattaaagtaatgggcttttacactaatgccacactaatgtaagacaaaatgcataaaagaaagtggagatgcggggtatcgatccccgtacctctcgcatgctaagcgagcgctctaccatctgagctacatccccatgtcgaacaattaagtgtacagtatataagttagccagtattatttcatagtgcttggaaaattacacactttttcagtgttttctcaatttcacaatggtcttacaagtttccatattataaaatgagtaatgataaattgcattatttgtatatcacaataagggatttatgagaagagtgaattgaggaaattaagaccaacacaaatcccttaaaaacattattaacagttgaagaaaaaaagaaccaatagtgtgaagaactctttcttctacatctaagtatctaataacgaattcaaggcaacgatggttttatagacttcctaatgtttctgagaacgctccacataaacgtagatacaaagaagagagcaataccagctacaatggcttgtttcaaaccaagatttaccagcaagttcaccaacagtccagccaacactacaccgcagaaattagacgaaacagcagaccaaaacggcatgtcgaggattgatgctattatagctcctgtccaagcaccggttccagggaatggaacagctacaaagagcattagccctaaccatttgaactcttccacaggtccagctttctctttagctcttttaaacaagatatcaagtaatttagaagctgtttggctcttacccgccacaaaagatgcaaacgttttgaggtaaagtacgatgaatggaactggaaccatattgctgcggaaaagaacccaaaatcagcgtcacttctacttgcttacataatgaaatcatatgaataaggattgaatgtttgctctaacttatcatcatatgccacatattcttattcaacctcatagcttcaactaaacaacagaaagatgttccccaaaaaagacatagtgccattttcacacacaagttatcaccattctaccataaactcaacagaaatgagaacacttgttaaacgttttcttttattcaactaaacaacagaaacgtgtaccctcaaacaagacacattgccatttccacacacaagttatcaccaatccaccttaaattcaacagaaatgagaacacttgttaaacttattatagaatcaacttagcaatagaaacgtgtaccctcaaagataaaatcacatttcagagaaatgtcaacctcaaagttcacatttttatcatcatacataatcatcagagacacttgcaaactctggtctaagcacaaatcaacaacattatcaagaagtgaagatctaagagactaacccaagaacagagaaggaagtgagaaccaccggttttagttgcatccaataaccaacaggaatggcaccacggagttcaataaccggaagagtagctaaagcaaacacaacagcttcgtctggccaaccaaaacggcgaagagtggaggcgattctgagaccaaagctcgaagatttgatagaatcagtcgcagctttggcatctccagacctagcaaaccaaagcagagagaaagaagcccacaacacaacgcaaatcgcgaatttcacagggtttacaccaatagacggaagctgaatgatttcgtttccttcttcgtcgtctttggtgtttctgagaaacccatctggagaagaacagaatctggtgaaattgcggcgtaatggatagaaaagactggaactttgactctgcaggaaacgaatttgcttccatttgggtgaaattggataagaataaacccttgaagcaggtattgaagtaaggagatgggtttttgttgatgaggaagaagatagagtgaaagaagagattgagagtaatgtagaaatcgccatttttatagttcagctttgatctgatctttgttgactcaatagatatattatttccagaagcagcaaaaatgcctgaaattgtttggtcgttcaatttggtttgctcatacgtggttttagagtaaagactatgaaactctctgtaatacttggtttaacatttaattgataaaacatgtttgaatatattcatggtttcctaaaatctaaatcaaagattatataattcaagataaaaatctcatgttatgaaataaaaccgaaaaaaccttaggctcacttaagggggtatattcaatcaaacgtttgaagtgatttgtgttaaaatagtaaatcatatgttattcaatcatggatttttaaaagtctcatgaaatctaatgttattggactagtgattttaaaatctactttaaaatctacttcaaaatcttcttaaaaaacattttaaggattggatttttagtgactttaagatatttaagtgaatttagtagatttacttagttaaaaatatagaattttaaatctcatggttttagcctttacgtgaaatttgaaaggattttacaataaatcctaacaacttccgtaaatttacccaaattcttcaaatcatataaaaactctcaaaataaatcaaatcactgacaatataagatttggttgcacccccctttgcaaatagttttgagtattaaaaaaatctaccactactatttcgtataaaataccgcatggaaaattcgcgtaattggccatgttcgaaaaattttggtaaaaaacacttgctaatttcaatataagtttaatttagatagtggtattcggataatttgagaaatatctaaaaattatgagaaaattttgataaattttagggattttcaatcatactagaactttaaataatcaaatgtttaattcggaatttggaatttcagatacttggtttttccggcatattccttatatatgtttgaataaatataacaaattgttaaaacctaaaccaaacgaacaaaacttcattcaaatgctctatccagatgtactaccaaattcaaaaatgtgcaacatccaaataggtcatctatatgcatcattctcatgtacaaacgaacatgccttacttgaaaggtggttcatattttagtcaaaataaatagattatctatatgaaatattgaaggcaacaaagaacatcgttggattgatccactccgagagacaatggaatacaagatttagttttatttagggaacacatttagttttgtactcaaaggaagaaaattagtactttaagtgatcatcaatgacctaaatacttgacaggaacaagtagaagctcattttttttgcccacggcgagtccaggagattcttccatgtcaatatcttcgaccaccataccatctggtacttcccaatcaaactgatacaacatattcgctagaccaaactccaccattgttgtccccatgtacattccaggacagattctccggccacttccaaacggtaacagctcaaagttctgtcctttagcatcaatgttattatccataaacctttctggataaaacatatctgcatctttccaggaatcaggatcacgccctatagcccaaacattcacgtaaagcaatgtcttgggttgtatcttgtagccattgatctcaaattcagacataacttctcttggaagtagaagaggtactggaggatgtagcctccatgtttctttgatcaccatcttcaagtaaggtagatgatctatatcatctaaggtgatcactgatttgtttatcatttggtttctgatttcggattgtactttcttcatcactcgcgggtttcttattagttctgccatggcccatgtcattgtcattgcagaagtattgatggccccaagaagaacgttctgtgataagatgagaaaacaaagtttagaatcataaggtatctaatgtgttgcacatatttgtatagtactaaccattaagatggctttgacatggtttcttgtgagcttgccatatccaagaacagtttcttctttctctaacttcaagagcaagtccacgaaatcttcgactccttgtttgttttcttgtttatgcagatcaaacatttgttgatagaacacatcaagatccttgacgcttttttctctccgcctttgtagacccgtgagccagtcgatgatccagccaccatttgggaagaagtttgaggccgagaagctccccaaaaacaaaaacgcatcgtggattaacttgtcaaatccatcattattgagaactgaagtatggaagtctagactgaatgctgccttgcatatcacgcttacagttaaatcaagaaacttctcgctcaagttaactggtgatttctgagaggctgattccgtggctgaaacgatcagtttcctcacttcttcttccttgatgggttgaatagagtgaactcgcttagcactaaagagttcttggacacaaatcctccttaattctttccaataatcatcaaaaggagagaaagcaatgtccaagtaattgtaagagagctcttttgcccctaacgaatgatcaaaatcatggtttttgttgagttctatgaacaaaggaacaaatagaaagaaagaaaattgtatgtgttaagttagagttatagtacctgctaagctaggacggctacaacaatgtagatcattgattttcagaacttgttttgccgtctcagaagaagaaactacgaccgttgggacacttccaagcttcaaaagcatcaccggaccatacgttttggaaagactccatagagattgatgtggtaattctccaagctgatgcaagtttccgatgatcggaaagccaggaggggacggtggttgctgctgatttgtccgacgcttcttgtgtttaaaggcggcgaggagaatacaacagagaaagagaagtgaaagaaaccaaatcgtagccatttttccgtattaacgtacgtctcaagttttctttgtgatattgatgaatcaagctcctgctttaaatatatacacatttcttacattattgtttattgctgtcttaaactcttttaatttcgttttcaatatttctttaaaaagattacattttttgttggaaatttcaaagaaaaatgcataccagaatcaagaagccgtctaaatgacgaagacctaccttctcttaatcgtgtctccatctttgttctgcattttaaatttgtcttttaagtactcattacttgtcttttactaattaatatacgaaacccaattaattggttaatgagtacacaacaaagtcatcggtcttttaatatgcaactatgcaagcgacaaggacagcttatctaactacgaaaagaattcttctctagtaactagatttaccactaggtctccactacataaacaaaatttataaatttcaataattatgtaataagtttttgggttaaatattgccttttaaaaaaaacttagtcgtatttcttagcaccacatgtaaatatagtaggcgaatatataaatgttgttaaatatcgcctactactagatttatgaatatttaagcttgactttatcttagctcaaacaattcatataactaaggtctctttgtttaaccaaaaaaaaaaacgaaggtctcattgttacttggtcatactcttgaaaataacacgtcaacgatatatgtatgtaagggccacttgttatttagactcaatgtgattttaacaatagaaaatgtttgaatgaaatggatataggactaaattaaattacggatatgtaagagttggaattccaaaatggacctacataatttttttcttgcaaatttgatcggaagagggggtatattgaataattaatttatttgggatacaactatgagagttacttaagtatagagctaattatgaaattaaagaaacgcgccgcgtttttgatccataggacggtacaaaaacggcgtgctgttttgttttagaataaagcttcttcgttttttggttctttctcttaaaatatcttcgcgacaaagaaccatcggagaagaggaagaagatcagtgtagagctatcgggaaatttatctgaagaggaaactgaaattgagatcgaagttttgagtttgggtaaaaaatggtaggaggagtagaagaattgagtattgaacagttagcttcgagtatctctacctacaaagaacaactcgaacaggttcgttcgagacgatttctttcttctctttgtttcagaattttgtatgtggattagaatttcgaattggtgaagagaaattgaatgtaggtttctgaattttgtgtgattgttcctgagttagggttcgtaggaatagttttttagggattcgttgatttgacgagttgttgttaagtttcattgtatcttcttcctttgtgaattaataatcagatttgtgaacggattaatcactatactagggttgcgagttctatttcaaagtctgcgtttttatgttcctttttagtctctctgataggtcttttggcttagttttagtagggtgatggaatgtgatcatacacttgcttctcttctgggttatctgatagaagttttgactcttttggtctcaggttaggcagcttttgtcagaggatcctaggaactcggaatatgcagacatggaaaaggagcttaaagaggtgatcaatccctattttaatcacttattttgtgtgatcaaatcttttcatctttgttgtggattcgttttattagtctcccttagtttgagtgaaattcattgatccttatgtctttagcatttgcggcatacacaacatgattaggttacttagcatgtaggttttgcatacggtgctctttatgtttctattccctgcctcttttgaaggaatctgcgtgttgtttgaaatagcaacatcatttaacagctagcagataaagtggagttttctttcagttctggggtttgaaaggtgagtatgtttttgagtggcatgtaactccggcagtggagtttgggtcagccaaaagcagttgttggcgtatacataaaagtaggagagttagcaaagaattcatcatttctatcttggttatttgtgttgtgcaggtgtgcttatatgggtcatgatggccagcctgcttctatctcctgatttctcgtgtttgatccctgaagttctacttctgaaaatctttactgatatattgtgtataattgctagaaatcctcaattctctgaaactttgtttttgcaccatataggtgattgcattgacagaggaagttcttgcaactgcaaagcaaaatgagatttctctatcagatgccggagttagtgctgaagcaactcctggctcacccgatttagagggtgcttgggaaaagacggtatgtctattttgtcatcttttctcttttctttaccattttaggctgttttttgttctctcttcctctctctatctccatcatcttctcagatgctgccatgtgatttttttcgtaaatttgaatacagaaacatatgctactccagagcttactaaatatctattttggtgattaacgtgtgtttgtatttcattgtttgttcagggtttaaggaatgacccaatccatgagggtaagttccctgttggaactaaagttcaagctgtctttagtgacgatggcgagtggtatgttgaaaaactctcgggttacttgtaattaatgatgtatctactgtattctttacgtctttttctccctttttctttgtttgattagttaaatgttcaggtatgatgcgaccattgaggcacatactgcaaatggctattttgttgcttatgatgagtggggaaacaaggaagaggtaatgcttctattccagttttattttgtttttaaaacactaactaatattgagattgccttgttataatctaggtggatccagataatgtgaggccaatcgagcaaaatgctattgtcgaagctgagagattagctcaagctaccaaaaatgctctcaaaagaaagattgagaaagctgcgagttctgattatcagacaaaaactctaccagcaaagctcaaaatcgatcctaatgatcccgaggatgtagtaagtcaagattctttttcacccattttggtcccatgaggtcgtgttatgaggtctttactttttttttgttttggtacagaaaatagctaagcgtaagaagatacatgctttcaaatccaaggcaaggtttgagcaactcgaggttgtgcagaacaagaaacagaatgattggcaacagtttcagacgactaaagccaaaactaaaaaggtttgttagatacggaattcatatggctctttgttctcttggtggggattctgagacgggttttggttgtgcaggtagggttcttcacagggaggaagaaagagagtatatttaaatcacctgaggatccatttggaaaagtgggtgtgactggaagtgggaaaggtttgacagatttccaaaagcgagagaagcatcttcatctcaagtctggtaatgctgagggcactgatgaatgaacgagagatttttatgcttttgtaaggattttcaggtacttaaaaagtctttcttctgtctccagtaacctctaaaaacaaaaggacctaaacccgcaatttttttgtggacttctgctcttttgtaagatgaattaaagattagttttatctttctatttctttgtagtgactatgatgaatagagccacagccaaaacggcattaccgttaacattgttgttgtttcttcttcggatggtaagttgtctattgatgaatcactctcactgtctcatattgaactgtgccgcatcatacggtttatgtttaaaatactaattcagaaaaactttagacccaccattttaatgtatttgtatcaagtttcataatgaaaaatggtgttaactgttaagtatatattttccatggcgtagtttttgttccttttgattaaaattgagtatttttctatgttgtatggggtttctaatggtttgtacatcatataaccaaagaaactagagttaattaataaacatgtcgaaggacacttatttgcatgcatctcataaaaaataatagtgctgaattatgcgaagaattcagtgctgaattcatactgttttgtgtaatttggtcggtaaaatctctgccgttttaaattagtcaagctgactcattagtttatttgacaaataaccgcaccgtttcatgttaggccatcgcgcgtctcaccgcttgacagacgactgcatgccgtttgtactcaattttaagatgtacgaaacatattcaaaactcaaaaaatcatcgaaaggcaaaacaaaaggctaaaacccctcaaaaataaaacagcgagacggcaacaacaaacaaacaaaggtccaatgaagaaagcatatattaaaaaaattcttcttcgccgattgagaaatttaagttatcgagtctttttttttctttcgctgtacccttttttggaatagaaaatcatcatcgatcactgtttaatgaagacaacatacacaaaaacttactcattccggattgtctgaaacttctcccacaatggtacagacctcttcatatcacccattaagcccttgaacttgtggctatagtccaccccattgatacgatccagtgacgatatagcacgaagagcgcttctgatcatatcttcattacgatcatgctcttgcttcactgcatcttgctttggcttgaagcttattgttttatgcagtggttccacaagagaatccagtactgcaaacatcatatacattattaaaacggatcagcaaatctgctttatgttccgtggctgatataatgattttggaaactatatattaaacatacctgcaagtacggctgatgggcatttatctgctagtaaggagagtataagatgacaaagcatcttcaggtcataatgatctgcataaacaaagattatgttataagctaataaaagaaaatggctaaacagtagattaattatcatcagaggaagaccaaaacactcgccttctaatccggatttgaggaaaggaacaatgaaagaagacggattaacttgatcaaggcagctgtccaccagagtaaacacacactcaaaagctgctttcctcagctcgagcccgtcatccacaacatgcttgaatggaccaagatcaaccgtcctgattaattctttctgcaaaagataaatgtctcaggcgatggaagataaaaccttctaatgtattatatgacacagataacaactgtgctgaatcactgaagaacttaccttaataacggtctgatcataaagaagtggtaacaactcagggagaagtcctttaataaggtttggtttataatgagcaaaagtactcagagctgagacagctgcacgcctaacatgctgcaacaacagaaggaaaaagttaggattacacagcaaagtgtcattattatccaatgtctattgatgttttatgttgtatcaggagaaaggggttaaaaaatttcacttacacggtcaccatctttgattagcatgaggaaagaagaaatctgagggaagatgatttcatctaatttctcaggtcgttccactactgaatatttcacagcagtaacaacagttgcacgggtaaaagcagctgggctcgttgtcctgacctataaaattcagaatgcatctctaagcataacagcaaatgagcaaaatgcaaaaagtgagattgttctgtagctgttctctacctgaagtgctggaacaagtttctcaggctctatcaaagccatttttcccaagcattcagcaacaacattccttacaccttcttcctcgctttcacagtggttgaacagtaaagcaagtattttctcaacgctggaattctggaaatccgctttatcaacagactgtctcacaataacctggaaaaaaacaaggaacaggatatgaaatcaagcagtttatgtaatctgatattataacatggatacttgttaaggaaaacatacctccttgagtgaatgaaggagaatatattgttttttctgttgattatcgatctggtccaatataaacggtagataattggatagattgccaacggcaatgtttccaagagcatatgaagctgcggactttatttcttcaaaaggagattggaaagactcaatgacgattgtttcaatgccagcatgtgcgctgagatctttccttctcccaatctcaccaagagataacagggcaagatgttgttttgcctgcacgagaaaacatcagtacaaaaataagcctttaagtagctgtagatctactaaggaagataaagcctgaatctaattccctaatggctctcaaactaacaaaaattcaaagtgcttactgaatttgtgccgctgtcatctttaaggatttccatgagcattttaactgtagacgaacaattcttatcacccgctgcgagacaaagaaccgccacacactgtgcaattgaatatagtgcttgctttgggacacctccagactgaggagaaggcttagcacaagatagcaatgattccagcaaggtgtagaaactcgtatttgcatgatacaccagagcttcaaagaatttttgcagatcctgtgacaaacatccaagaaatcattgccttctaatctttaaggtcaggcaaagtatataacaattccatcagtaacaaaaaatttaccaaaagtgcttgaccctggagcaatgggcttttaactaaagttagtgcctgcggaagaactttgttgcggaccgccaaactgatattttcactacaactctttccagtcatcagagtgcagcagagttcgagtgcaagagctgtcatgtgcaggtctgaaacactgaaaaaacacagacgaagtcatcttttaatatatataccaacctagaaagtagaaacaacaaaaatcaggggaaatttgttcgagaagcaaacaaaccttatcagagatgaaagctccacaagaataacttcataagcttctgaaccaattttatcaccataggctgttaccaaggtattcatagtaatcagtgttgcttgccttagaacccgattagcctgttttacaaaaacattaataccagataatgtcttcaaggaaatttccactaactatgagaaagtaaaccaaagaaaagtacatatttgatgcctattaagatatggtgctaagaagccatataccttccgtaagaatcctgttagttctgcaatcaaatggtccaagacacatgatagattaatgtgaagcggagaagtggcaatgacagaaaatgcctgcatacacccacacaatcagagacttgagctaaaaacaattttaaaataaaagcttcaacagaagcccaagaacaacctttactgcagtgaggcgagtgatttcgtttcccattcgatcaacaagcacaggaaggcatgaaggtaactctgccctcagttgatcaccaaatgttgaaatcacaagacccatgcaggtgatagcacactccttgacctcctgttgaagggaagagatattacgaaatgtaaataacacaaaattacaaatacaaacgcagaaatctgcttttccaattctgtaattaaacataatgacgaatagaaagagttcaaataagattattaagtctattgcccgaagaagtatggattttcataaacaagactaaaaagggggatttatgctacagacctggtcctgatcttgatttgtcaagcgggacattatcgcattgtagattggatgaacaaacggtttaaaatcaaagcccattccctaaaccacagaagaaaaaatatcagcggatgtttcagcctgtgatttataaatagcttcggcacaaaataagaaacggcaaaaaaattgtgagtctgtatatgggtatatatatatggttcaaacttctaaataaatgaagaggaaagactgaaatcagtaaatgtgtacatgacatctaaatgcaatgagatactcaccgcagtacttgggcgtactactctgacaagttccccacaaacccttaatgcctcagcagtcaccttataatagcgttcaccaacagcagctaaaacaggacttgaaagagcctagaattacaaaaaagttcaagagtcagtttttactttcaaaaactgggttttgaagtgtagggagtcaaacatttgggcaatatatcaatagactgaaaaccacttaatgtttcccaaccttaatgtaagggtgaaaaacaggaggcgcatgtgatgccaagactaatttggtgaagacaagagcttcaattttcaagtttgatgtagaagatttatcctggagaagtaaaaaatagagaaaacatgagcacttgaaaaagagcaacactgacagtgacagtccataaataagtgtaatgaatatatccactaacatttagcgccctttcaattccaggaacaagtgaaccaatatgatcagcaagacagtcaggcaggacaaccacaagttctctcaaaacagagaatgctccaacctacagatatgaaagaagttatgaaagtatcaaacaggaaccaaaccaaaaagaatgtttaacactttcatacctttgtcttaacagacttttcgcgcagttgcctatttatggatttcacaatctttgagacttcttgcttcagtagccattttggactgcataaaccaaaggtatacatatttagttagcagggtttcatcagaaatgtgacagaccatccatattgaagtgaaaggactcagaatttttgccttgattcatcggtgtcagtttgaccttttgtaacatttcccgtttgccgcaacagatcaatgaatgtgttgaatacatccatctgtaacaacagtacctcagtcttagatcaataaccatattgcaaagcaagaatagagcattaatggattaaattacataccttcacattttcctccctttccttaaatctatcaattagtttcgggcaggcctgcacaagaagagactaaactcctcaacaataattctatagtagattcttgtttcatatttaatcaaacacaggtaaaagaatgaaaaactcttgtgtaagggaatcttgtacactcccgtcatgaaagataatacgcttgatcatttaaaaaagatatacctcttgatatactttagtgagcatctcagaacgcgaaacgattaatcctgctaggcatttggccgctgctctcctaactttccagctggcatcttcatcatctgtgtactcatttgcactctcgctgtgagaaagaaagacttatttcagtgagataatggtgcaccgtaaggagctaggctactgttccaatgaataaatcagaacttactcatcttcttcatcttcaagagtctcattatcagtatcttcctccatattgtccgtaaaattcgggtcataactaatatattctaaagtaagatttaaaatttcatcacaatatggtgagatgtccctgggacatcgtagcaagaaactttcaagtgcctgcagtcaaatttcagaacagacatgttatcgtctacattgttcataccaattttattgaacctaagattagaattccaatttaatagcataggaaagaaaagagactacaagcacgcctaagtaattgtctgattacaaaaattagatgagaaaacaaaaaatgcaagcgtagtgagaaagtaggaacattagggaatcttgcacgatacctgtaagctatactcgcgaagctcctcgtcattttctgaagcgctagtgcagtaattgattaatactggcacagtgttacctagatgagtgccaaaccggtaaccaacagcacggctgaaacaaaaacgcattaaatagcattacaaccatggcaagcctagtcgtagataaccattcatcccaatcaataaataggtagcacaagtacaactaaccgaagcatactacaacactacagtaacgtatggtaagaagttaaagatatataacaagccgataagaaggaagataggaagtaccataaagctccaatcatttgaatattggtacgtgtaatctccgattttgcattcctgttacttagatttttcacaacttcaacagtcgccttcgcgagcaaatcatcagacagactggaagcaagagaagctgacaccacacaaaattttgaacttagaagaggctatataccatcgaattaagagttctatatacgactaggaaaaaaatgacattgaatatatcatttgaactagcatcggtttcacaagaattgacgcaaacagctgaaaaccatatttctaatatagataaggaaagctaccactcaagtctcggcagattaaagttggtttcaaattagctaaatattgacattagtaccgacagtacccagcaatcatattgactcaattttatgaacttaccaatgcatgtaacagtcttcttcctgactgtggcttggttacagcccaattgcaataacaatgtattcaatagcttctcgtgatcatccgtcattaaacttccatatttttgaacaacatcacacatgatctcaagacattcacacttgatccctgagctcattcccttcagcagtaaatacgcagaaaattagttacttgtaaaataagatgatagaaccttagagtagacaaataattatatgcatatactgtgctctggtctactaagagtttttcagacagagttctttaactgtattagatccaataaaacttaaaacgtaaaatcaactaattttccaatagatgtcaatcaatatgattttgatgggatccgaaattgtctaggacgaccctaagcactgtcgcatatgcaatcgaaataataaggaatagacctcccaacaactaacctggccacttattcctcctatcatttgtggtgttagagtaacaagaatagatggagcaagcgtaggagcaatttgagcgacaacagtcctgagagctatgcttgcggtatcacgatgctggtctttcccatgcagcagtttatcacataacttgttggtcatttcaacaattcgttcttctccaaccttcttcaccaatggagcaagactggaacaaaatcataacatcaaaggtcgacgatagatcagctaaatgtaaaagtataacatcagcttaggtcataagttgctaagagcagaaagctaaccatttaacagccaatccagaaacatcaccagccacatcatcgagctgttgcaatatgatactcgacaatctcacctccaagtccaggtcgattttaaaggaatccttattcaactcattaagcaaatcagaggttgccatgtatctgtaatctttatctttacccgtcatctgaaactatagtaaatacagcaatgagaaaaggtgactatactcaaaaacaaaattaagcttaattagaaacagatgatgaaaagaccttttcgagtatcccagaaacttgtaagttcgccatattggcccgaccttctcaattcactccttccaactgcaatcaaacaaggatctcaaaattcattacttagtaaaaagagaatcaaccatgcgttgaactaaaacgcttagtcagagcaatgtcactctatcaagctctccacagaggttaaaacatcagaaacaaagtcagaagtgtaaagaagaagcatcgaagatggattaattatcgccggtaacaaaacctaattaatatcccttagaaaacttttgattcatcgaagatcacaaagaagaagttcggtttgataaatcaaagtatcgtcgccaccaaaaccctaagactacgactacgaagacgaaaagagttaacgctagacatcatcacactttatcgatcaaaaagcaaaaaagaggtaaccctaagtaacctgagaagatgaaatcgacggaggtaacgccggagacggagtagaacgccgagagttccgatttggtggtggtggaagttgcggagaggagagagctctgaggaaagtaaaaaaagatggaggagatactgtaaatttccgtactcgtgaaagcttgatttttagcccttctctcttcttaaggaggaagttaactttcttctaaatgggcctgtgtaggattaattgggcctgacttggtgcgatttgagtcggttaatgggtagcgtttatttcatgctgtacattgttggacttgattagtcggttaatactaaatgggtttggcccaattactttgttttcagtctgagcccaagcatgggtttctttgtttgatccaagtagttctttttttgtttgctttttttgtgtcagggacatgctatgcgattgcgaccaaccaactaaatagtgttagccattggttcatcgacaatttatggtcaatatttttgaacgattagcaagtaaaaaattgtatcactgaaagttttcaacctaggccaagtatatgtggtttagtggtaggggaagctttgggaaggatgaaactcttagacccgagttcgattctccttgaaagttggtaagtgtataagttgggtcttggtttaattggtttacttggtaattagaaatgtaggcggccgcctgactaccccctggcattagtcagaaagcatttcaaactcgtgacagacagacagtatggtggtttttcgggaagaagtccactcgaaaacatttcggtgtgtttttactagggctaaccagatcagccgataaggtttataagaaaaaaaaaaaattgaatcaaaatcatttgttaaatgttcccgacccaacgactaccaaataaacatgatttcattgtcgatagtcatcgctaacgattataaagttaacaaaatataactgattgtcattgttgctaacgactaaaaaaaactaaaaccgtaaaatatggtatagatgtgagattttttgtcgaaattagacttcctttattttgaactagaacttcgaaattcaaattattagatacttttgtctaagtagtttcttcgtcatctgtttcttccacttccacgtgtgtaaatttttcgtgggtttcaggattaagtcttccttatgctatttccttagtcttagttgttgacaaatatgtgcccgtagaatcttcatactttcgaatgacaaattcatcgccagactcacggtcacgcaagaatggaaggttagacacctcaggcacattcaagtgttgaagctcttcaattacttgattatagacatactaatatttgaaaagcaacaaaattatgaattttttcagatgagaagttaggtcagtgctgtcctctagtagttcctctattacctgaaagaaaatgaataacacacatcatgtcatcatacatgcaaatacaaaatctaaatgtatagtatactactattttgaactaaaccaagtaaaaagtacctctctaccacgtatagttttagtaccaattatttcatatgctctttcggatccctccgttaatggccatttaaaatagtcacaatcgcaaagaatgcacatctccagaaaattatcgtctgtgaattctgaaaaatcgtaagattttgcttcttctttagtttctttttcgttgtctttatttttcttgctactatgaaaccgcttcaataagtctatcatttcgagttcaagcaattcaaagtctttactggcgaaaataatttgtgatcacacaaaagtttaaagtggtagtaaaaattaatgttatgtctacatgagaaaaacctttaaaataataataattgataagtgtattaaagaacttactcttcaacatctaaatggtatgaggtcagtgttaatagtgagaaccgcataaacgcttttatctttattattagccaaatatacaagctgtgagcagcaacgataaactcaatattcggatactttttttttttaaaccttcaatgggagaaaaaagaaaggttaataaaaaattagaaagaagtgaaaattcttaaaaataattatttaccgtaaatgttacctcaatgaaaacatgtatcacataaggcgtgatgtgtatatgactttgaaagatcttagtagcattcttctctttgtcctttctcttagggtcatcgggagccataagttgtgctgatgcgtcaagatcctttgcgtattctagagtttttattgggttccgcggtgacttaataggtaaacgatgtccatcgaaaacaagaataggattcacattacggtcgatgaattgtttgacttttttgatgacaaacattatatgttcagagttgggtgtagttggttcctccaagaatttccgggcattatttaaagcacctctgtataaccacattgaagcgtcaattgcgagagttttactgttgagagcggaaaaactaattgatttcagaaccttggattttccatagagagagtacaaacttgtgaagcccatagcttacaattattctttttttttctttttgaagcaataacaaaaaggagtgtgtgtcaatatatatagtgtgatgaaaagagtcaaaatttcccgttagctattcctttccattatttctgctattttcattttttcctagtttacatttttctatattattattgttatatatttccataattttgtttgattttgctggccgatttcatcgtacggacctaacccggttcggtttggttcaactgtatttctattatattttctggaagtttttctattaactataatatatattaggtgatcactctcgatacgtcgcagttttttcggattcttttgtattgtttaatttaaatataatttttatttatctaatcattcactcatgcaataaaaaattatttcagtattaaaatattttttttctaacaacattctcaataatgcatcatacacatcattcataaacaacgttcatcttaaaccaatttaacagagggtagtgttcgtaattagaaacataagaatttgatgatggatcggagctccgtacgtattatgtaccctcgatgatttattatataaatatcaatttaaaaaataaactactcaaatcattaactaattcacgactattatacactcatactttgagtttggattacaaaaaaatcttcgagtatgaaaaaactattaaaataaaatatttaaataaatttattgaaaaatttattgaaaaatcatgtaatatttaaataaatttagtaatagtacagtaaatatgtaaaataaaatcatatataaaattaaataataaatttatcattaacttataaattaaaaattgaaaagtttacattaattatttaatagacacatgataaatgttaaagtgatgatgtatcgatcatatgtaaagagttggataatttatatatatatatatatatatatatatattttatattgttatagtgctataatgctatgtcaatcttgaaggagataaaaatatatttgaataaaatgacgtttcaataacaaaataatagtaatggcaatcaataaactatgtcagttaattgaatttttatcttccacgaaatacgcaatacgcaattcattattgatgttttactgaaatcgagtgataaactataggcataaaaaattatactactataaaacaacaagtgaaaatgttacatttaatattacaataaatgaaacatgtgatatcacaaggaacaacaacatcttaaaatcgtaactccattttgatgcatgacatattttatcccatatcacattacacgacttgcaatatgccaagaagtcacataaagtaaatgcacataattgttcaaataaaagaaaaggtccataaatgagtttactagtacaccaaccaaacatttactcaacctaatacgtcatacatattaggacttgacttacactcgccaggacaatctccaactctctccattgatagaaatcgtaatttattgctctctttgttttccgtgcaatttatttttcgatcatgagaatgaaaatattttttcaaactagaaaacaaaataatagaatcaaagcaagaccggatgtttaaaaaacaagacaaatcaaaaaaaaatattttgttaaatcaaaacaacgacaaaaaagaaacaagacaaatcaaaacaagaccggcgtaagatttaggtaactagtattaattttgttatggactttgtatgatacacttcctttaataaatatcagaattcaaaaaacaaaaacaaaaagagttacctatgagaatctaaaattctgctactcacataaatagtaaacgtgacaaatgatatcacgaactacaaagtctaatgattcgaagtaaataataacagtgcacatcccaatgcattggttaaatcgccaagaattttcttaaacatacattataagaaaacatcaaaaacttatcttacacgctccaaaaccaagattataggtaccctaataaaacacatgtttataaagctacctaaacaatgattagccgagaaaggagaaaacattaaccatacgataagaaagtacttaattaattaagtaatcacatgagtgaagttatataacaacaatctgaacttaactaaggattagtagaagcaagattttcagtaatgtcgttattaccagcagaaaggtcgacattgttactaacgttgttgctcttcttggagagattttgtttgttgttgtgcatccaaactttaagaactcttctcctaattccaatctcttgacaaagctgttgaacaacagattcctcttgtctctgaatcttccaaccaactctttccgcaaaactaatcatcttctccttttgctcttgtgtaaactttgtcctaaaccttttcttctgattatgtccgtaactatacggtgatggtggtggtggtggctgccggaatgtcaagcttcctccgccttcttcctccataagatcctctgactctgagttggatccagcggttgtaacgccaataggcattatcatttgttgtggtaatggtgatttgatcatcttgtggtggaacatgagttttctctgctgcggaggtggttggtggtggttgaggtaaggggaaaagaatgttttctcttcaccttcggtttctcttctatgaaagtttctatggcagttgcaaactgagcaagtgagagcttcaatggaaccttcttcaccacttggcataaactctccacaaccatcaatggcattgcctcccatggtagctgcatggttctttaggcattccttgtactttatcaccacaggcttctctttcttgatgttggtaaccatgatgttgtaacccacatgatgatgatgagaatgatcatgatttttaccaagaccattactatttgaggagactagtagtgggtttgaagtagtaatgttgagagatgatggtgcagaattggcatgatgatgatggttcatgttcccatgcccacctccactattaccataactagtgtttattggaataggatcttcttgacttgcaatctccattcttttgatctatctgccaaggaaataaacacgattttatatttaaaactttttttgggttttgcaaagtgtttcttggtttggggacaaagaaactagttaggaagaaaaaaacaagagtaaagataattaatgagtaaaattcaaatgattaagctacaaaaaggcaagagctttcttcactactcattaaccccatttttttaattatttcctccaaacaaaaagaaaaaccctaattttagaaggtccataaagatagagaacaaaacgaaaaagtacaaaagaaaagaaaaacttattgcaagcctgcttaagcaaaagctgacaaacccacttgagaaagaaaggtcttattccaagtgagaggttgatgataatcaagaagacaatctttattgtatcaccaaaacaaaattgttctatttaaaccaaatgaaaaaattgactgaagaagttaagagcacatacccacaaccagaaagagcagcaaactttatctcaaaatgaaacctttcttgagaataaccacaaggttctgagaatagagagaggctaaggagtttagagatttaattagggttttataaagtgatagactttgaagaaagaagataaagagagagagagagagagagagaaagagagaattgcaggtgggttttggatgtgaaggcacttcttaaactaagggcttagagtattagtagtgaaagccaataaagcatgagaaagacacatgagagccatagccatagctaattatttcctcacttttctacagacaaagagaaaaaagatcattaattaattacacctagttttcattttattaattcatatataggatattttattcaataatgtctctaccaaattaaaatttgggtgataatatatagacaaaaacaatacaattgtgatcaaaatatggaaaagaaaaagtgtagctaaattatttgaaacaaaaaaagctacatcatttaatttaaaatttgaagaaacaacaacaatcactaaattagactttataagataagtagttattcatttttatatacatttttactcatgaaatgtcattttataatattgatatatcgcagtcattgatgaattgaaggttatattgaatataagaccatcctcattcttcattggtgatactttgagggtgtctttaaattaaaaataatagaaaaagataatttaatgtttttaattgtgtaatagtgtctttagaaagacattttagatctctaaaatagaagctgtctttaatttaattttaatttatttttgagatatctacaaaggtatgagtaatgtggatgctctaagattttcatattcacccaaaacaaattatcagtaaagggaaagaaaaaaaagaagagagccaagaattaggattatgggagattgcttgtcttgcactatcagacatcaaatttacaacagtgtagaaacgtgtcagataattagtgggaagagtattgaagtagataacaaagagaaagtcataataaataacaatatctcatctttgttccaaaacattaaataactaaaaatttggtagtaaggtataataataatattttttaccatcttaaaatttaaaagtgtgagattgatactaattcaaaacgaaagaatgttctaaacattactataaagccttaacttgttaagctagttaattaaaaacacatattgttcctttacccttcggccttcgccattaattatgtcacgtatgatattagcttcaagaggttgtcatgtcatgcttgtgaatttatatgatttacttgaagttactattaattattggtcctaccaaatatgtgcacttatataccatgatcatccgttttctggaacatacaattgtgagaaagaatcaaaagataaacaataaaataaaaatatcataatcaactgataatatagttactgaaatatattcataaaccaaagtttgttacgagttttgttaagaccaaaatctcgattattattaagttttgataatataaagtttttggtttatattgcgggctatcagtgttgtaaaattagactctatgttatagatgatatatgaacaattgctcttgggtggcagaattgtaaattttggcctaaaagtatatatagtaagtcttggtaaatagattttttttattgctttacattttcgacttaattatcactaatccctatttttatatttctttaaaatcaaacaaatgaaaacatcaaatcaccaatacatattaagattttacctgaaaactattactttcttgcttaagattattatttctgcttcttgatgactaatgttttaagatatatttttctttttgacggtcaaaaaatatgtttcattttcatgttttgaccttttaggtataattgttctaatcgacaaacttaattcgttttagaaaagttctaacaaacacgacaagttgttgtctcaactacggtggcggttgttcctctaggtgagtggggactaatctcatttttattgattcgtaaaagaagcactaactaccaaattgcggcaattgctaatgaccattcaagtcttaattacacaaaacacaattaagaaataagagcagttcactttcttagtttataatttccttgtgaccttgtgggcttttattttataatacaaaaaaaacaaaaattgagatacttttatctttttcttttgttttcttcttgtttctatgtgttgtctattcttctggactctggtaaaattccttccattgtagcagctttttcaaaaacaactcttttattttctttgtaccttacggtttacgatatcatcagaataatggcaaataaatgcatactccatataatttaatttaatttcccgtcgtccatactatgtatttattcacacgtcaagtgacttttattcgaggtgatgtaaaaaaaaaagcgacttgtattcgaggtataagaaacaaataaaataaaagggaccacaagaatatttttcaaattattcaattattaagaaaaaacataattaatgaaaatggtaaattatttaatatatattttttcctgtgtcgttagttatataattttttgaaaatataatctacgatatttaattatatgccgcttacgtgattgagataaacagttttcacgaacaagattttatggtacaactctccctataatattatccgttttttacatggatcaaatttaatttctgtttcggcatgtaagaagttcatatatttcaatcgaaataaataaatagatagtatattatccttatgaaaagttctaattatatatcgcataattacgtacgtatcattgttgatgagtgtaggatgaaaaatggttttgctctttgggatttcgattggtttgggatggatgtttgattcttttgaagttctagctaatcataaccatttttcttataaactgaatatggtatttttttttttaaataaaatattttgaattaatattggtttggattttgaggcttacgatatttgtagacaatgatgttttccatcatggtcaaagtaaaaactaaaatattaaacactttaatcaagaaaaataaatttatatatagtctttacgttttattttatatatcttttttaaaaaaactaatacatactacgaaaactattaaaatttataccatttctcttattaataaagtactttattttatctctctaattattatagaagtaaaatatcaaacaaaatataaacttttttttttcttctttttttacaaaacaaaacataaactttggttgcactgacagtgaaaaacgactcatattattccaaacataaacaatttttcctaaaactaaactacataaaatattagaatgtagccgaaacctacattattccaaacggtgtgagtaaacatgttggtagttgctaatgctacctcggtcgtgtcgtatttcagtaaaacgtcgttgttatactgaaacgatatcgacttcataacatcgacatcgttttaagaattcaatattggctaagtaaaataatgtcactttattatagtactatacgtggtttctgaattaacacatactaatatgttgactcaagtcttttgagtcaagataggttttagttacactcgaatagtttatgtataatacaccaattggtatataaaagcgcatatttgtttgggttgaaataagttgtgtttcgcattgacaatataaaatgatatatcttgtgaaaccagagttaaatgtgaaaacgaaaattattataacatagcgtaaatacacaattacacaacaaaattagcttttgtcatgtattatattttttttattgaaacattgaatactattttaaacagaaaacatatgcgtttatggggatggggataggactggagggcaatgcttgtaccatggaaaacaaggagtttgaatttggttcacggatatcttcgcgtcggttagagaagctagtaatcgatgaattggttttgaattggcttggaattttgaatttggtgaaagaagaaaaggctcggttctagcatgggcaaggtgagatgctaggagcagagtaaccactattgctattgcagagagccttacaatcattttcatgttttatttgggaataaaaacgtttaccgtcgcttccttatttatacggttttgatcaaaataacaaaaaagcaatatgatcttttttgttgactagcttttattttttgtgaccaaaaaagaaggcaatacatatgatggatttattactagaattatctattcgatatatatcaatatggttgtattagttgattatgtagtgatgcaatggtaagatatagtttataaatcagttttctatatttagttgagataattccagtctataatatttattgacataaaaatattatttcgtgaagaatttgtttcatttgtttttagaagtaatcctttatccgattatttacttatgatttatattaataaaacaataattactaaaaatcatctacatttgtttaaaaaatttgtaatatcttttaaaacttatgtgaaaaaacaaataatactctttcttagagttactttcacattttcagtatttaacagcctatggggcattttacatttttatctgataaggcgatgtcctacgatcaagtttctagtacaattaacacagatgaatctttgagccttgcaaatgaatcttcaaaagttaaaattgtgaatgtcggattccacacttaagtatttatttatttgtaggataaaactctcaagatcaaaatacaagataaattcaaatagcaaatagtattaaaaatgtaagtaaatgtggataacaaaagagtatagtattagctcttgatacaaaagatgccccctctctttaggtgcttttcaacctcatatttatacaatatgattcacatttattggctattgaatacaatgaatacttttaaatgtgtctatttgattttctattcaatgctttaacgtctttatttgaactcttttatcctcttcatgggctttccgaagctcggcccattgttcactttcgaaccgttgttgactttaccgaactcctcacctcgttggagtaagagcatggacttcggttcgtcattaattttccgttcactcatcttccttcataccttatgcttacatgacaatcttcggttggatctaagtactaggtttggggtcagacaccaacaaaaattctaggaaataaacaagcaactcaatgacaagtcaatgtgtctagaaattagtcgcacaatcaatcatattcacacaaaaaagtttgaagttcggtatgacatcatagttggtgtattaataatgcataatgaatttgttttgggttgatataagctgctttcttacatcaacaatataaaataatatattttttgaaacaaaaattaagtgtaaatacaattattattgtgaaatatatgtgtagattcacaataatacaatccaatattaatgttgccatgtcttatttttattcatttaagcgtttagtactatttgaaaacaaaataaaaacaaaagacatgtgtttatggggatggagatgcagatggagataggaattggatacaatgcggatcccattttggaaagaaacaaggaaattgacctggaggccagtaagtttggtcagccgatatcttcgcatactggttaagtgcatgagaaatttgctcagttaggaggattggttttgtgttggtttgaagaaaagggtcgatcctagcttgtgcaaggccagatgcaagaaaaagcagaataaccaccattgctattgcagagagcttcacaatcatcttcatattttgatttgtgagtgaaaatgtttaggctaacttacttatttatattgttgtgacaaaaatagctaacagtagtatgatatcttttgttgactagaattatatgttgtgaccaaaaggaaaaggcaatatgataaatttttgactggaccaaagtgcaaagatcatattcttttgttttggaacaggattgtcaagcattcatagcttttaaattggatctgattgattacaacggtagctttagatttttctgttgtactttaaagatttttagttattttgtaattgtagaagtatgaacgggaaatcttttgttttttttacggcatattggtaaatttatctttagctttaagaaaaagaaaatatgactgatacattttatttgtgtattaattatttatatttctttttattaaagataatatttaattaaaaagaaaattacaaatttatagcaattctaatttttttttgtgcaataaacaataaatatataattatttgtcagaagataaaagctaaaaagagacagttaatgagttttcttcagctgcaacttggcttcacttgaaccctattggagagagagtggactggtttaaggcgatttggtttaaaggaaaaattcccaagcatgccttcattgcttgggttaatatgagacataggctccatacaaaggatagaatgataagctggggatttatttttccgcccctttgcttattttgcaatactcatgatgagacaagacaacatctgttttttgattgtgagtttgcaagggaggtttggatctatttcacttctcgggtccatgtttttcctcctcttttgtttgaagatggaattagatggctaaagaatccttgtcaggacaagaatgtgacgacgattcttaggctttcccatcatgcatcggtgtacacgatctggaaggaacgaaatgctcgacttcacgattcggcttcaagacctgcagcagctctgattttggagattaagtcagttattcggtgtcacttggatccgctttcaagagctcaaagattaggtcctaatagaatttcctttctcgccacttggtttggtctctttgattgataatgtgctctattattgttgttgttgtcttgtgtttcagttcttattaggtgtaactcagtttggaagcactatgtaacctcttttcgttttaatgaaggtaagtttaaaaaaaaaaaaaaaaaaaaaaaaaaagaaatagttaggctagaagtccattatatagttctttaaaggttttatttgttttataaatactaaaatacaaaagattcatgcatccttcgttgatagttttgttttatttccaaattttgttaacttctattaaaaaaaaatattttatctgaattggactctcggttcaaaaataatgatttctcaaattaaggaacatactataattatttaacaatacggtcttgcaaatataaaaattataaataactttagtggacatggttggacgtaacgtaacatatataatatatatatatatatatataacaagtacaaatttgtatttttatacgttacgtccaaccatgtaacgtatatatatatatatattgaaggaggattgtacttgtattatatatatatacaaatttgtattaacgtatatatatatttatataatatatatattgaaggaggatatattatctgaattcaactctcggttcaaaaataatgatttctcaaattaaagaacatactatgatttatttaacaatacggttttgcgaatatataaattataaataatttcagtggacatggttggacataatgtataagaatacaaattcgtacttgttatatatatatatacatataattttttttttgctaaatatgtaaatatcatataaaatgaagtgcatttaaatagaaagcttttaagtgcatttaaaaattagattatgcaatttaataaaagacaaattctcaaaatatatccaatctgtatttttcaaataagatacaatatagatatagtcaaactttcaacattaagaattatcttcaaactgttatgattataaaaatttgacctctcaaaaaaatatgatattactataaaatgtgtgagtcatattctagtatactatagtaatagagttgaaacagaaactttgtccaaaattcaacatagaaatactaaatgacatactttgtaactttttttatagatttatgatataaaaaaaacactaatacaaaacatattttatgttgttatgtattatttaagcgattaatatcattttttggagacagtctaagatgatggtggacatccgggattttgataacctggaggacaataaggtataactgggaattgttgcactgatatcatcgcgtcatggttcggtggaggtggaggaaatggttcggttggaataaccggtggattaaacggtttagaatcgatttgaaattttggctttagcgtaggagaaaaaggttcaatcctagcatgaccaagaccagatgcaagaagaagcaaagtagccaccattgttattgcggggagcttcagaatcatcttcatattttgttttgtgtttgcaaatgtctaacctagatttttatttatattgttgtgacaaaaatagcataaagcaatatacttatctttttgttgactagaattatatgctgtgacaaaaaaaaagacaattaatatcatagattttgactagatttctgtccaaaaaaaaaagattttgactagataatttcatatagaaagaaagttatatgtaactgaataaatgtggtgatttgactaatttcattggcaagatttaatttctaatatgaaataaatcattaggattgatatgtagttatgtaccaatacaatttaaccatacatgtgatgtaagtaaaaggataaacaaactgtaccgtgtaaatgcttcatataacaaccttcatgcttcatgcttcatatgatattgatttttggtttcaaaccactcgagtttttacattcgtcttaaccatagccaataaggaggatcattgacgttgttaaaaagcctttgctaatgatatcgcacaaaaacgactgcttgtatcacataagaggcaatctttattctccagtgtcatcttagaagaactactattaagcaaagaaatcacataacgaaaccatgtactggaaactgtcatacaagattataacattcaacatagagatcagagtctttgtctttcattcacagcttattgagacaatccaagaaacaaaaaaaacagcaaattgtgaatccatcagctctttatctgccacggttttcatcatcgaaacaatctgcaacaacatgagtaatttcctttagtatacaaccttttacaaaaaaagattcagagccaaacaccaaagagggtctcatagaagaaaagatacaaaaaatgacacctatctttcagatcattagtattaaagcaaagaaccaacaaacacagaaatcagacaaagctaatgctacacattaatcatcacagatacgtatagacattttgaaattgatctgaaagataacagatactaattagcaatatgctaataatagctggtaacttttaagagtgtacataaagataatcactgaaagccgtaaccataaacatgtgaccgatccaatcccaatacttcaggattctaaaagccataaccatttgttttagtctcaaaagtgtttattcagctttgctctatacattacctcaaggaatggattcatctcaaactaatacacacattagccattgacaataaagcttctaacattgaatcactgaaactagacaaaaacatgatctaatcccaaaccttgattctaaccatattcctagattatatgcacaaatcttactctatcttccacaaaacttgacttcaaatctcataactatttgtattagtctcaaagtgtttattcatctttgcttgcaaggaatggattcatctcagactaatacacattagccattgacaataaagcttctaactttgaaatttcaatcactgaaattagacaaaaaacatgtactttgactaatcccaaaacttgattctaaccatatgcaaaaatcttactctatcttcctcaaacgtgacattctaagaactttgccaaagtttttgtttatccaatctttcacagagaagtcaaatcgatttaggatataaacctccgagaagcaaaacaaattcgagaagatttgatttttattttacctaatgattctctcagtgagatggagcgggttgtttctgatgcgatgattgagaagaaggagccatgagtttgctatagatctgttcaccgacgaggtaaacgcagaaggcaccaacaccgattccgatacctggaagtgcgtgtctcatttgattcgatagcatcggatgcttcctccactcatcccttcgccggaaaaattcaccggttgttcccaacggtttcgccattttctccggtcttcttcgatttttacgtttttttctttctctttagctttgttgtgttgttttactgtattgaattatgggccttattaaaagcccattagtattactgagtttttaatgggcctgatgggcttattgtttttagttggccttatatatatattggttctccgaggaaccggagctttcttcttctctcaggcgagataaaacatggcgatgcttcagacgaatcttggcttcattacttctccgacatttctgtgtccgaagcttaaagtcaaattgaactcttatctgtggtttagctatcgttctcaaggcaatttctcatactctttatatacgttcaaaccaatgaatctctggttcggtgaggagatttttgattgtttctgaatgttgatttttcagttcaaaaactggatttttcgaaaagggttaatagaagctacaaaagagatgctttattattgtcaatcaagtgttcttcatcgactggatttgataatgtaagtgttagttcaaaacttggaatcacttagttttgaagctttatctctagtttaagttttttttgtttttcagagcaatgctgtgaatgtaagtttaaagttttgaatcaactcaaattttgaagctttttttttatctctaatgtttttcagagcaatgttgttgtgaaggagaagagtgtatctgtgattcttttagctggaggtcaaggcaagagaatgaaagtaagtgtttttgggatgaaagtttcaaactttatgctcgagttttaattgtttgttctgttgagttgtttgtttttctatgtaatgtgaatagatgagtatgccaaagcagtacataccacttcttggtcagccaattgctttgtataggtaacatttcttacttgaaagtcagttgattggttaagtcttgtatgttgtttgaatctgtttctgataactaattacagtctcgtttgattgatggaagagttgtaatttgactgttttttcattctgcggaatctacttgtctattagtattgaaccatctttgctttgtgttcgttgaattttatgtttcattgttgcagctttttcacgttttcacgtatgcctgaagtgaaggaaattgtagttgtatgtgatccttttttcagagacatttttgaaggttttttagtctctctttctctcattagttatgtttttggttgagagatgttccaaagatttctctgagcctctttttgttttgtggtgttctagaatacgaagaatcaattgatgttgatcttagattcgctattcctggcaaagaaagacaagattctgtttacagtggacttcaggtttatacctccgttgctttgattaacatatccaatgaatcatttactcaaaagaaataattctacaacatactgtctgttctagttcatataagcttcaagtttatttctcataggaaatcgatgtgaactctgagcttgtttgtatccacgactctgcccgaccattggtgaatactgaagatgtcgagaaggtatacttatgagaagtagcaaaagattaaggagaatgaaacaaaattctcgaagtccctttagaatttattgcactgttgtattttgttaaggtccttaaagatggttccgcggttggagcagctgtacttggtgttcctgctaaagctacaatcaaagaggtacaaaatcttaagttagttttttttttttttgtcatcaccacattctcgatattcgacttgttccattttgcgatatgcaggtcaattctgattcgcttgtggtgaaaactctcgacagaaaaaccctatgggaaatgcagacaccacaggttttaaagtatactcatgctttgttgattgatttttggtttcaaaccacttcaataatgcatgctttttctgtaggtgatcaaaccagagctattgaaaaagggtttcgagcttgtaaaaaggtttgtgaaccttcaaatgattttctgaagtgtggattagaatataaaaagattgattactatttgtgttctatatctaaaacagtgaaggtctagaggtaacagatgacgtttcgattgttgaatacctcaagcatccagtttatgtctctcaaggatcttatacaaacatcaaggtaacaaaacactaattttgtgttttttcgcagccgtagaatgaaaacaaactttctcatccattgcaggttacaacacctgatgatttactgcttgctgagagaatcttgagcgaggactcatgagatattatatcatttacttagtaagaagacgtgtcaagggtatgcatgaaaaatgttttattgaaatctttgcatcctagtttggtggtttataaaatgtgcaagataattgtttcactgaaaactacttgctgtgaatatggattcgaacagagccaattcgaagtagaatttgcatattgtagtaaaggttctcactaaggcaataagggtgccacgagcgagcacaaatatggatccaagagattagtttgttaatgatgtttattaaaacttatatttaaataacccctaaatatatcataatttatatctcaagttatgttcaagtagggctgtcaaaatacactcgcatgagatgaagaagaaatagagagaacgaggaacaaagaggaagcgagaagaactccactgtaagatgaaaagtcagaatcatacatatatgattttaaaataaaaagtatttggattcatctttaggggtaaacttttgtattcaccctctttagtttaagccaatcattatgtcatgccatacattaattaaggaaacaaaatctatatacttttaattaaataaagttaaattcatataccctgcaggtacaagattaaatttattaacagatggttaaattgattatcggattttagtttagggttttatttactagaaaaaaaaaattcagggtttaaaaatggatccgcccaatggtgagagtttttttttccatcaaattcccaatataaaacgatactttttgtaaaattaaaattaaatgtttaacaattattatggatgaagtaatatagatttatgatataaaagtaaacaataatacgaaagtgggtttccaatgttatgtattatatttattttttatttaaaaacatataactttttgggctgcaatttttacaacgcaaatgagaaaaacatatgtatgagtattagttcggtgatatcttcggatactgataaggcggatgtcctggatgttttggaggttctggataatgaggaattggaattatgcccgggtattggttcactgcgactttggcattttggtggggtggatgtcctgggcgttttggaggccatggtagatgtgggataacttgaaattggtttactgatatattctcattctggtttggtggaggaggaaatggctcggttggaaaagtcgggtatctagcaagggcaagaccaaatgcaagaaagagcaaggtaaccacggttgttattggatagagctttaccatcattttcataattttgtttgtgattaaaaatgttaaccctacctttcttatttatattggtatggcataagtaacatgaagcaatataattattttgcttgactggaattatatgttgaccaaaaataaggcaatatgataaaatatttaattgaattgtattttctaaatatagtaatatacttatatagttcttgaatataatatatgttatgatttttttgcgagatagtttatatattatacctcctatcttttcatgtacttatccaacgaatattttccttaaaataatgactgtacaacatattttgtagtttattttgcaaagaaaattgatgtgaactgcaagaccgttggtgaccgtttcgacttgttccattttgcgatatgcaggtcaattctgattcgcttgtgatgaaaactctcgacagaaaaaccctatgggaaatgcagacaccacaggttttaaagtatactcatgctttgttgattgatttttggtttcaaaccacttcaatgcatgctttttctaatatttggttatgtttttgcagttatacatacaatatgtattgctaataatgtctctcatccattgcaggttacaacacctgatgatttactacttgctgagagaatcttgagcgaggactcatgaggtatcattcagaaaatatttataaagctttttaggagttcactaaaattattacatagcttaatcattgttgatatatgtgtgtcggattataatggagtcattgtttggctcttcaggttttggatcagtttcggttgaaaagtttgatttttatttgctgtcatttagcgaacttctcaccacatggaacagttctattagtttttgactcgagagttctcagtgagaacatagtataaaatgtgaccaacaatggctgttattttcctactgtggatttatatgctttatattgacaatacatatgttcaactcatactttgcaatgtaatagaaaatttcagtttcttgagttattttggtttcagcttaaaaaaaggaggttgtgtttggtagcaagctagattcgattaatactgggattattactaagctaagttggaaaacaaaatctagaaatgtgggaattgagcaatagaagccaatgtttaggaactgattaagattttcaaagttttgagagaccaaaacttcatgtgcttgagttagtgattatatgtttgacaagtaatctaaattcgtatatttttttaaaagaaatctattagatgtaaaatttaatcatatactacatttaaaagaaaaagaaccagcttccttacacctttattttcgatcaaattcaaattggaggtgttttcagactcataaagtcattattctttcataatattgattctcatgaagaaaaaaagaaaaaaaaaatcttaacagaattcaagagaaagccaaaatattttatcaaaataatatcactcatcgttaccaaagcatcctagccattcaaatttgacattaatattgaaacataaggtaccattagcatatatatgtttatgctaaatattatagctctaattatggatgaagtaatatagatttataatataaaaattcacaataatacaacatatcttatgttgtcttatattataaattttccatttaaaaacatactagtttatgggatacattttttataacccgaatgacaaagagatttgtatggatattagttcattgatatactcgcgctttggtgtggtggatgtcctggtgatggtggaactggatgagaaattggtaatatgcgtggatattggttcactggtattttcttgttttggtgtggtggatgtcccggtgatggtggaactggatgaggaattggaaatacgtccggatattgcttcactgatatcttcacgttttgttgtggtggatgtccctgcgatggtggaagtggatgagaaattggtaatatacgtggatattgattcactaatattttcttgttttggtgtggtggatgtcctagtgacggtggaactggatgaggaattggaaaaacgcatggatattggttcattgatatcttcgcgttttggtgtggtggatgtttcagcgatggtggaactggatgagaaattggtaatatgtgtggatattggttcactgatatttcgttttggtgtggtggatgtcctggcgatggtgaaactggatgaggaattggaaatacgcctggatattggttgactgatatctttgcgttttggtgtggtggatgtcctggcgatggtggaactggatgaggaattggaaagacgccaggatattggttcactgatatctttgtgttttggtgtggtggatgtcccggtgatggtggaactggatgaggaattggaaatacgcttggatattggttcactgatatcttcgcgttttggtgtggtggatgtcccggcgaaggtggaactggatgaggaattggaaatactcctggatattggttcactgatatggtgtgatggaaaaagaaatgctcggttgggaaaatcgagtatctagcctgcgcaaggccaaatgcaagaaagagtagagtaaccatcattgttattggagagagcttcaccatcattttcatatttttgtttgtgattataaatgtttaacctacctttcttatttatattgttgtggcataaataacatgaagcaatataattattttggttgactggaattatatgatgaccagaaacataaggaaatatgataaaaaattaacttaaattgtatgttctaaataaagtaatatagttatattagttgatatatgttacaatttttttttctcaccagatatagatacctccattcctttgatgtacatatccaataaatcttttccttcaaagaaatattgtacatgtattttattttttggaggaagtgtatgtgaagtttgccagaccgttggtgactattgaagtctgaagatgtcgaaaagatatattctagaaattagttttttttctttatttgggataatttaaccggttttgtttttcaccaatttagccggatattttagacattaaaaatatatcaacttacaaagaaagaatcacctacatttgaaaaataaccttttgtagcaatgccgaaggaaagaagacaaaatgatatttttgtgatgaaattttaatgcatttcctagtccatcacataaaactttttaaacattaagaaaaatatccaattactgaagatagaattattaacataaaacgtattgataattattatataatttaaaagataaagacacctaaacaacaaattatccccctcaatatctttctatattaaatgaggaaatgctatggaagggtgtggaagggaatttcatgatccatttatcttgttcatcaactaaaataccgaagtgttgaataggttgcttatgttgaatattatatataataatattctattttcaacagcttaatattataaatttataattttatcactactatatcgtgatgattcgttaattactaaaataaatcaaaaacaaaaacaaaatctgagacagtttgatctcagctattctttatctaaattttaattttcctagtttacattattaacttgatttacgtaaaactggaaggtccaaaccgatttaaggttatataacatagagtaatataatatttgttgaaattccaagtattaaatagttttgatttttttttttttaaaatatactccactaaatttttggatgatatatatagaaaataaattacataaaatattataaatataaatatttgttccaaaaaatatatttataaatatcaaaattatagtttgttttcttttataatttattctccgcgacaaaccctttggtctattacatttactaacttttcaacttttcatctccccgcttaagttaggtgaaacaaaacttacataacctttttgttcattttaaaattttaatattttttaagacttgaaaagagtttaacaatagaaattttgatttgtttcaatagtttcaatatgtgtcataaaccaagtaaatatgaaactaaaaattacaataactgaaaaaggtaaatcacaaataataaatattatttatttttccaacaaatgcaacacaaaaaaattgaaaaatataaactaatgtgcaaggttaaccaattcgtcgattatttcacagtaacatttttgaagtttttataagatagataacaaaaatggataggaactttacagtgaatatattaaaactgtcctttgacatatcattatcaaacataattaagggaaaactatgtggaagtggaagaacagatgataaattagagcttgagggaacaattttgtttttcatgactaaagaacttagtttcatcttctaatgttaccttctgctttccttggcttagcacatccattaaacagagagaaccgactcttccgatttctccgcgaacgaacaggagttcccttgacctgtttcgactaatcaaatccgcaaatgaaaaacaaatgagacaaagaaaacatcgaaaaggaggaacagattcgagttattagcacaaaccttgcttcgtctctgagtcttttttgtgttccaacaaaataatatattacaaccaactcttcctgatcctgattcgtatcctcctctacacaaccaaagccaaacatgacatcattacgacaatacgttgattataaagatcttatttgttttttcttttcggttttgtatcgaaaaggatcagagtgaggaacttacagattgtctttgttgtttccgaagttagtatcatgaagtaagcttggggaaagaggacaatgctgtcctcttgtaccggttagattctcctgaagctcaccattgtcgccgattttcaaaagcttaacttcattgtttagctcatctacccattggtgagtggttaggccagaagaagaaatagcagaagctacgttagtttggcgataagtgtcttcttgaggtagaatctgattcctttcgggttttacccgtattatcgatccaggtgtgtctttatcagcggtttgtaaccaagcggtttctaatctttgttctctgatgattgattctatcctttgcatcgggagttttgatctgctttccacgctgctaccaacttcaacatctgtttcggcatttaaaccagcgatgttatttagatgcccacttttgttggtcatttctggtttccgggtttggtgagggacaacgagtaactcggtttcaggcaagagaattatcctgacctctacgcttcgccttagtaccatttcaatcgagtttgtgatactgcttagaaacctttcagctctcagtttgatatcgttttctccaaacgcgatataagcaacgagaatacctgcaaatcatgtcatgttcattttattagaatctttggaaaggagaaaaccaaaaaagtgagaaaagaagaaacttttaggctttttaccctcaacttcactgatagatataagtttcccatgagtatagagcagctgcctcagtgtctttgagtgacatctttcaatacattttctccatatatcgttaagtttctctgaacttctttgattaagcatcatggtgcttgcgatgctattttcatgtgaggcaatggaaccttcgctctctatcatttggctagatgaggaggatttatagcagttattatcgataaccctggagaatggtttcgcttcatgggaatgattcccgttcctttttataaccgaagctggagatgccgacttactaaagtgaagtcctcctattctctgtttgtaagccatcacttcccttgaaacgcttgctgggtcatcgtcagttgctctagagctttgccttctactactgcctgtatgtgtggtgccaggagaaggcattgacccaagctgaagcaaagtcgctgtgaaccatgttgaacggtcattagaaactctcagctgcttctcagcctcagaaagaagtttcaaagcatgctttaatccctccatatctgcttcagtcactacaaaaacgaagcaagaattttcgaaaatcaaaccaagtggtttatgactcatcgtagggagtaaaattgctcttacaggatatattagcttaagggtgttagaaaatatgaaacgggcaatgatctcaacaagctaccagatcataacgcctcactaaactacttttttagcacatatgaccaatatgtaaatactttgctgggaactcacagtttcttccgtcaaagaaggcgttgctgtatttttcatctacgaccttgtatgtaccagcaatgatatccataataagactggcgagttgagacatcaagactattgggtcagctccaaggtccaacaactctctagctcgcttaacagtctctgctgtgtcagaagacaatgctaattccaagagttccaacaatttttcatctgaaacaacaccaacctgaacaaacacataatgccacatttttaactttaataaattttactttttttcagtgcacagttacagaaagaactagaaaaacttactagctcgtttactaaagctgtggtgatgcgttttcccagcaaactcagctgctccaacatagtttcagcatctcgaagtgagccatccgcgttcatagcaatcaggtccaacgcatgcaagtctacatcaagattttcgtctgaagcaattttctttagtctcactactatgtcagaatctttgagtttgtcaaagagaaacttctggcaccttgactgaatggtccggggaacattttcaaggtcagtagttataaatatgaagacaactttctgcagagggttttcaagaaacttaagaaaagacagccacgtcttcgatggcagcaaatgacactcgtctatcacaaaaaccttgtacattgaggaatttcgtggaagtatcgtcggtaggttttttaaaaggtacctaaccttatcagctcccttcttattagctccatcaagttcccaaaaatccttacttttcccagacatgaaatcattgcactctttacagtacccacaaggcttcatttcttcagtggccacacaattcagggcggctgaaaaaatccttgcggttgatgttttaccagttcctctaggaccctggaaaagataaacaggagcgatcctactccttttaacagcgttcattaacgattgaaccactatactttgtccaatcaattcctcaaaaaacattggtctgtacttttggctgaagcttcggattgtttccggtgtacttccttcttcttcttctccatctaacgctacagcctccaaaccatcttgactcctataactagtagaccacctcctcccgtctaatctactctgagcctctaaatcaagctctccataattggtagaaagctcatcatcactaagcccggttcctaaagaagaccctcctctaccatcaccaccgtaactgagtaaaggtaaaacaccttgtgcacttctacaagcaattttttgtttactataccctccagaagaatgtctattatgtctacgatacacagattgactcccacacaaaatgctacttccggttcttctcaaagtatccgaaaacgatggagagcaacaacttctgcatccgcctctatgtttcatcgccttcttcgtccaataacacggaataccacatccttgcctccctggtaaatccaagttatcatccaactcatcatcaccatcattcaccgaagtcgtggtaccatcccaagatccaacagtgctgggattacgaacagcatacatattgtacgaactagtggataaagccggtgtactattataagtacatgaagaatcctcttttctattattagctctcaacaatcttgacgaagaacgtgaccagttcttctgcttaagcttcaaaagcaaaggagacgcaccagtgaccttcctcaaatcctctgaattactcaattcctcctctgtgtcatctgatccagcattacaatttctagcaacaatgtcatctctaggttgatactttgacaaacaatccaaacgagaagagctaatttttttcttactcttcttcttacaactaccaacattactcttcctcatctttgacacaccttgtgacgctagattcgtatctctacacctaaaacccatcgaagctgattgtatttctctacgatacgaatcaccaccattcctcgcatcactcacatcatcatcatcattaacactagcttgcgtccacgaagaagcatcttcttcttcttcctcttcttccttaccattcttagctaatccacttttctcactagaagatttctgagtcttccagttatacaaaaacaccttcttctctttcccacgacgattagtactactctctcctcgaatcggaaactgactcgaactgccaccgtttctgctcgccggagtctccaaaagcgcgacggatcttgacgaatcgagaggagatttccaggaggaagtagtacctggatcgcgtaaaacacggccagcttttctgatttgagtcagctccttcttcagatgcaatttactcagatccgaaactctcgaacctgacattttttcttcttcctaaatttgaatcagcttccttcgatttcttccttctcctctctcagcttcgcgttttcactgacatttcaaaacctgtgcaatacctaatcagaacaacgcagtggaaacaatgaaagtgaagaaaaacagaagaatgtaaaactgtagatccaagataaaacgaaggaatcgtggaaacagcacgaaacactaagaagaaaataataatatatacttgtttgttcttcgagagttcgccggaactaaggtctagggattataatacatcgccggaagtggaacagagaatgatgaatctcgagttctgaaacttgatagtcgcctgcgactgcgagagaacgcatgaaggaaagcgagagacactattattttctatttttaaatttccattatttttaattattttaatgggtttttttaaattcacatttgtttgttcgggtctcgtcaaagcccctccttgtctagtgttttcgtgtctcgtcacacttagttttttctttctttttttctcaaaaaaatactaacaaatttagtcaaaaaaataaaataaacatcatgatgaatactaatagagaaaagattagtgaattatcaatgggaatatttgtatatggtagaatagaatgcttaccttaatgaaaagaactatacattaaggtaattctttgcagacttatagacgttacatctctatttcgtaaggaagtgtattttttttgttgaacaaattttacattatcaggaataaagaaaaaaggacagacattatgtgataactatatttattaatttcacaaaacaaaataactatatttcttattttgcaaaaaaaaaaatataactatctttattataggaataatgttgaattttatactgtttttcttttcttaatagtttggtatggaaatgaacatttaagattatcattactatgagaataaatagtgttgttgaatattagttcatatgtagatatgtattgttagagatgtcaaaatggataaactcattcaaaccaatccataatccaagtttaggctgaaatggtttatgagttgattcaattcatttgttgaacggattgagtcaattcattaatccaattatttgatggtttaatggttaaatgagttgattcctgaaaataaaataattaattaattaaatagaataattaatcaataattattaccattgaataatatttagtgacataaatagttatgattaatatcatatttttagtggaaaaaccacggaatcatgttttcgtggaaaaatatgaaatcatgttttattaaaacaaatgtgaaatcgtatttggcagaaaaatgttgaatcgcattttggaggatattatattgtgttggtgaatacttacattcgtgttttcaacatgtgcgttatgtttaaatatgttactttattaatgccataatatatttttatcgagtttatatcttcaaatttagatgtaaacttaaaagaacatttgcaaaaaaaaaagtgatttgtctaaatatcgtataatgatataattattttaaaatccgatcttcactatatcactacaattctacaattctcactttttcgtttaaaaaaaataaaaaaaaattggtcgtatttttcagatttgaaatatcagtatattgagttctgcaaaaggaaaaaaaaaaaaaaaagtttgatgcatcatctgatcatcagtgaaaatatttttttatagtagaatataaagatttattgtagaatataaagattaccatttcaaagcttctcaaattcttttcatattcataaaaggaagttttttggttgttgaataaatttacagtacaataaataaaaaagaatatacattatgttataactatatttaatataatgttgacttttatgatgttatctttaaaaaaatagttactgtgtgaaaataaatgtttatgattatcatactttgctacgataataaagtagtgttgttgaatattagttcttatcacgatatagtgttgttgcatacttatttacgtattttcaacatgtggcttttgtttatatactgtatgttacctaactgatgccataatatatttttattgatcttatgttatcaatgtaccctaaaaagaaaattggcaaaaaatgaaaattttgagtgtcatacaatgataacacaattattttttaaacgctatattcagatatatgtatatgactacagttctggcttttttccgttcaaaaaaaataataaatatatatatatatatatataataataataatttggccatatttttaagccttaaaacatcagtatatagtgttatatagctttttccattaatgtgatcaatactataataccatcatcgataaaattctctcttgttgttaacagacaccgaataacttatgcaaagatgagagggtttctcataaaccctaaatcttattctcctacttagtaaatatatgtaaaaacaatttgcaagaaaaaaaaaaagaacaacaacaacaatttgcagcaaatagaaaaagaaactaaatcaaaaacatatcttgaaagttgaaaaattagcttgttataactttaacaacacttttatgatcattttattttgttcatgattcaagagctctagagatcactaaacttagtttctcatgttaattagcacattcaattccaacaaaactagttggctatatacttcaattcttgtacatacaaatgtccataagtacgacatggattgataaaattcgataattatgtatctcaccagtgttttatgagcaatgaaaggccgaatctttgtcctgacaaatgtctttactgtaaaataaaatcgtatgtgttagctgttttaatgtttggtccgttggatacgccgacgaaaatgtataacatcacatgactatttgttgctattattagtattttattattattacggtcccttattattattattattgattcagttatatttgtatcacaactacgttgttggtttttttttttggtagtgacaactacgttgttgttgttatcaaggtatctacgtgcatagagaagaaattattattcaaggaatatttttaatgcaaaaaggaaaaaagaatagaggaacatttctaataacgtaaatttaatcatttataataatccaaaatgctaagtattaaatacttggtctgtaaaattaataattcctaagttttctaacaaacagaaacaaattacgaataataatcactgaggtaaatgttgagctagctagctgctaagaaaaaacaaatgttgagctaactttcaatgataagtaattggtcagacatatctaagaaagtttaaagaaaggattagatggaaaatcatgtggacacattgaaaattcaccacttccaaaccatgtcttaaatcaatttattccaatcaaattataacaattttttcttgttttgtcaactctacaaaggataatgcgccgtaatttttattttaatagtatcatacttttttcataacatcattaccgaaatatggatttggactttggagactcgatctcttattcttatcaacactaattattattattttgacaatgcacccaaaaaaaattgatacatcccatgcacgtataatttccaaagaaaaaaataacaatcccaccatccgaatagacgaatcttagattagacgacattacctataacgcatagtcaccaatgttaaaggcgcctgcaatccgataattccaatgatcaaaacatattaaatataatctttaacaaagaaaaaacatattgactagaatgcttatgctttaattaagtctagtttgattcgtctatataccaaaattagaacaaaattaaattaatcataacttctattttcggtttgatattaagaaatagaacccaaaggttcgtaaataaatataaactaaataaatgtattgtgagttttaatattaaaatctatgcgtactaagcaagactaaggaacaaaaattatatccactaaaatgaagtcttaacggattaatttggtaacctttttctatatctatcaacttgattttggcttgaagcattaagcattaaaagagaatgattaggttacaacattgatcgatccagtgattttgcttttaatggtaatcaccaaacgaaagatgttgacaatgaaaagtttgtgtacttatttgagtttattttgaacttgcattaaagaaaagcttatggttacttataggttggattcttttttttttaggttgggttcttgacttctttaaataatgcttttatagtttgcatgcaaaataacaaaatacctaataaaagcacatgcaacggttttgttagatataggaaggcccctgtccctgtggcccatatatttatagtcttttacttcatgtattttttttaacaagttcactttatcttgttcataattttttttttaaaacttcactttatcctatttcatcacttttagttatttagttattttataatcaactagtaatccaaacttttatcaaaagattaatctttttgggtgaatgtagctgtcgaataatacactcgcgaaattttataatggacctagaacataacactactttaattggcaaaatgaaaatggttagacaatttttattacataagaaaaagttaataatatatgcaagaggaagaaaaatattaaataaaatttaacttggggagtgtatcttaattaaaagttaatgtatccaagattagcctttgcatgttgagaatatgttgcataatgcatgagaatgacacacacacttgtgtccctttagataatttatgaaaagcaaaaattatgttttttttgtcaatgagcaaaaattatgtttaaatccataaaaatatagtaaactaataaatggagggaaaaaagggtgagttaaaaatatatacatggatgaacaaaataaacaaaatattaagaatttatacataaaaatctgttatttaggtaaatagacaagagaaataaaatataaactagaaatatccttcttgtttagattaattacaaaaatatcatcgattcaaaataactttaatatttaaaaataagtatataactatttgtttagcaagctaacatatataataacgtggtaaatttacatattctatgttaaataaatgtttatcgatttaaaattatgaatcaatattattatttttatatatatcaacacaataaaaatacatcatgttatataattaaaatgataacgattataataacattttacatagaataataacatgctaacatactaaatatcgaaataatagttgtctcaacatggtaagataatcgatatatgaataataacatggtaacatactaaatatcgaaataatatttgtcttaacacggtaagataatcgatatatggataatatttatttgaacgtactaaatgtttcatttaacgtactaatgtttcatcgaaccttttatttttagtttaattaatttaggggtataattgtcataaaattaaaatagtagaagacaacggtgttttttttgtcagttaattatcattattctgaggatagatagtcatattacccaaaaaaaaaaaagtaaactaataaatgagtggcatgatatataagctacatgcccaaacacacatccttgtctaacattgggctcaaatagatctagtcaagtaataatttgggctgtcataatttatcaacttcaatctttttttttatatatatagcaaaagttcaaaagacaacaagattgatggcaatgtatatttgcactatgaaaaaacaatagaagtattagataattaatacttgaaccattttttcaaatgaaacagtttttctttttgacaataatgaaacagttttaaaaaaaattagaagtattaatcctgactgataccttttgaccaataccaatttcataatatatggtgatataatcaacttaactaccaatcatatgaaacaaaataaatagctaaataaaagagagagtaagataaaagatgaataaaaagactacataacgacataatagtttttacaattttagcaaattactaatcagaaaaaaaaaaaaaaaattactaatcagaactaaaatatcttaaacagaccaaacaaattagtagtagaattaacattaacaacaacaaaaatccaaaaaaagaaaagaaaagacatcaccaactgtagatagtctcaatccaacaataaagactaagcaatacaatttttttttttacctgcttacatcttctaagtcccttttactggcatttcttataaactggaaacttcaccttcttctttcataattttctcctaactcgctttaccttttcataatttggttatttaacttcaaggtctagctctcttgttactgcaagttgggcatttgtaatgcttgatgtgttctgcttttgcaggtgttatcttcacacattttccatggaaccatttctcacacgcgtcgcagcaaatccagaactcatctgtaccgtagttgtctccacaagcaccacaaaccgcaccttgttcatcgtcttcactctcatcttcactctcatcttcttcttcttcttcttcttttggcggtggagatgacatctttgcaacctttgagagagattcggattggcgagactgtttgtgaggaatacaaagagataaaacttagcagagattgataaaacaaaatggtgaaacagaagagataccttgacgccactaggtttgcttttgctattattgttgttaacagatagatccttggactgctttgcattgccgctcacaacttcgaaaatggttggcagctcattaatcatctggaacagcctcttcctgaaaaagaatcggtccatggcataagcttaaaggcaagtgatagctaagttgttcaaacaaacctaatgccagagaagaatttgatgagattcagaatcaacaactcattctgctcaagctt

SEQ ID NO: 156 - DNA, 81004 bp, Arabidopsis thaliana
aagcttcagtaattattatactatcttgttacacttaaaccacaagcagttaagctttctaatcttcatatccactagggatgtatccatatcatggctgcttctaagtatgggcaagatgtgcttttgtataaagcacacgacaaataaaaaacttcctatagtttaaaggttacaaatatgattgataaatgttttgcatacacagtttaaatagtgtatatcttttacatgattgagcctgtgatatattttactatattatagatatgtatgtatacatcttccttctccaaaattttttttctagtttcgattattcacaaacgctgatttatgtgtatagcaaaaattcatgtgcgtttaaatttaacaaaaaatattttaaaatatcataaatagtaccactaacctaatttttaatttattttggtatacttgagtgatgaattaaaattgttttcgcatgaagaaatatctcaaccaacgttatagtatgtagatttatgaaattcctaaacagttccagctactttataatctgagtgtcaatatatggaatcaattaagagtggtcgagtaatcaattatatgattaactaatttaacgttagaccaaaaaaaaaaaattatatgattaacttaaaattttatattttccaaaactttggtgcagtgtttaactataatccgaggatgcacaacgtagtgaaggtagatagcggaagttacaacaactgcaaaacaccgacaggggcaaaaccttacacttcaggcaaagatcgtataactttgtctaaaggacaaaactttttcatctgcaattttccaaaccattgcgaaagcgatatgaaaatcgcagtcaccgcggtttgatcgaacatctagcaatgaaaatagtttgataacttgttatgttcttaagaaactattgaagtatgcaataaaactcgtatcaaaactttttttgtttttcttatgttttctgaaaagtatccggtgcggtctctctagagaaccagagtcggttttgtagtttggaagattcaaacggacctcttattatatttattataatatagttataaaaatatatttcaaaaaatatatatactgaaaatgatataaagaaaaaagaatgaggttgccaaccataataatgaaaaaaacagaaatggaagtttaattttggggaaaattcccaaaaaataactttatttatgtaaaatttactagattttaacacacggtacaccgagaagacaatttttttttatttaaaattagtatatataaaagtttgtaaataatatctatctataaaatatttttattttatagtttacaattgttattaagtaacgtcctgccaaacccgtcccgccaaaactgtcccgtaaaaaaaacctgcggcacatcgctaatttaaatatataattaaaataaatattttaccagattgcaattttattttgatttgtcaaacaaatttttgttttaaatagttgccaaaatctaggctcattttaagggattttacgataccaccgatttttttttgcatattttgttttaaataatttcagaaactctagttcaaattttggaaaattaagatttagtgaatagattagaaatgtttttgttgtgtgtttgctcattttaagggatctacatataactttttttgtttgagtgaatagctaaggaatattttgcacattttaagggattcgacaaatgtgctatacacgttagtatttaatagggttgattcgtttaaaatatgtgttcgtagccgcaaataatttagtcgttgggaagttttattttgaagcccaatagcggtgtaccgtttggcccaaaagagtgatatgaaaatcacaacacgtattaaaatcaaatggcccaaatctttgaaagtttcgaacgaatggagctggtcagagaacatcttaccaaaaattaatacaattaattaaatgccagtggcagccactgtaaataagtcccaactccaggatttattttacaaagtggctgcaaaaatgtatatgtagatatagaaaaaacctcaacttttttttttccggaacaaaacccaaattaatttattggtaacaaataaatccgaactataaaatgtttacagattcatacactgaatctcaaaaaaaaataaaaaaaatccaatgttactcttagaagaaaaaaacatatttatttgttcgaaatgaaagttttgtcataccaccttgtaacatctctatcccgttatataaagatagacgaaattggagcgtcacgatagacgtccacagtcggccaaacccaggtttccgaaacaaattcgtttgcctgagtcgtaccaccgcaagtgtctagcctcccgtctgtggcctaagttttttcaacccgtaccgcgaatgcgaattgtgtaagtcggacaagactaatatcagttggtctaaccatttaacttttagaaattcgagtcttattacatatatatcgtacggaaaatgggtaccaaatcgcatatagttttcggatcctctttgaaaaccatacataatatacttagtaagtatttgcaaaaagccataaaacctacattggttcgtcctaagtcatttgcgccctttacaaggctggccaactaagattttctgcaaaataagtagcgttataagtaatctagcattacttagtgaacctcggatctagacagagttaacctactacccttacccctaagcagcaatcaacacgtaataatactacgacttaacataaacagatacgagtaatacaagcaacacataatcaaagataacacgcaacatacaatacaagtaaaacattatgcacaatgcataatacatgcagactcgaattcctaatatgcacaatgcataatacatgcagactcgaattcctaatatgcaacggaaaactaatgcaagcatgcttccgataacttaggtaaggccttctacgaaaccatgctatcccgaggcaatggcctacacactcctagacacaaagtctaaagaaaattgctattccttatactacatcgtcatgtagcgcccggtcggtagcgaaccagtctggagcctttgtatgccataacggaaggagttacacgcgacgcacatcatatatatgggataacaagattcggctaatgctagttgactaactaacatgacaataaactcatgaaatatcatgcattcgatcctacatgataaattctactaatcaaacaactaatcgtacttaaatactaataatcacgattagtcccgctaatcatagtttaactaacactaatcatgcttagtaaatactaatcctaattagccattactaatcataattaacaattactaaatctaattaactatcttaatctaggattaagcaaacaattaggctaagtaattataattaacctcctaagctagattagggaaataaatgaagaaaatatcctattcacgtgctacttcacgtgacttgagactcacttggatttccctagcggtttaggcttctgaaggtttcacccgcgaactaagcttttctaacgagttttttttggcccaaggaacaaatgagcagagggggtatatatatgggcgttaggtcggctagggaaagcatgaggtggcccggccgaatcaaatcgcggcaagtgtcgtcccacgggtgctccgggacacaaatcggccaccgattggttctttctattttttcggataaacatcatccaaaagtggataaaaacgaccttaaaaggataaagatgatcggaatgtggataagcatcggccctaacggataagcttgagccgcgattcaatccttgccatccattctctcatttcggaggatcctacgatctgtcaccggatcgcaagaacattgagacggcattctccgtcactaatatctcaagagggtacgtgacacaagtcaagggtttctaaggactataatacattacatgccagaattaaccgagcaggccagttatcgtcacttatctgcattgtccgataaatctctcgatcatacacgacccattctcatatcggactgtcccaaattaactttccctcgaccttctaagttttccccgaccttttaaggtttcctagaccaaaactaaggtttccttaagctacactagttcttaagactaacctaatggtttaggggtttaccgacagtcgcatcgtagctaagcttggcccaactgatggagagtcattcctttacctgtggacttgatcctatctaatgctccttactcatgacttaccacactaattggctggactgatcttgccttgccttggcttgatcttgcattttatccgacaaaatgcacgtccggccgtccgggtcatagtcaaggtcaggggcattacattcttccccccttaaaataattcgtcctcgaattctaaggactaagggagtaactagcctccaagaaaaattgatttcttcgttggcttcatgaagcttcttatactaaggatctcgttttgggtaacaggtctttttgtaggtatggtctccaccattatttcttgcaacctcttcctctactttcaggaagttgatacaagcctttaaactaacagactccatctctctcttttctttgtttgtgaaaacttttttttagcgtcacctcatacggttagctaacgactttaacttctcggcttcctaatactactaggtttggtctacgaatcctaaggttccatcctaacttttatggttctttcctaactcttttgaaatggtcttcccgttttctagactttctaacttctttgggcaaggcttcaaggatttgatacttggttaagtacgaaacgaaacaaacacatataaacgcattaataacttgaaagtaaatcaagcaatcacacaaaacaacatttgtataaacataatataacataacaaaagttaacaaccataagtggaaaagaggtggttttgactatcgtacacacccacttattcaagcctacagacatcatcaaaaagatatcacattgtaacgaaggttactattggctctcctgtagccgccgctatacatcaaaaaaggggttagtttcctaatatttactaaagttaggactcctaagggaatcacggtaaccctaaactacacctggaacaggtacatccaagaaaagatcatcattggtagcgggaatcggtggggatgatggactaattgcgtgagacgggggactatgggttggtgcaggaatctgagcataatctctcaacaacatacatgtagcagcatagtgtccgtactcacaacaatagagacagacaacggtcatggacatgtactctgtctagaaccgacaatcctgcgggtaacgtccatcttcgccatatataaagcagtatggtatatgtatacctgacgtggtgccgtcaccaactgacggaatagcgtcagccctcatgtcagccgcaaaatggagtatgggggacgtgccctcccataacagtgcaaaagtgctatcgggagaatgaacgacagcctccgaaatgtatggagaaatcggtggatcctcataatcctcctgatctgactcataggatatcggtgaatacggagtaagagtaaaggatggcgtgctagaactgcctgaggaaccactcacataatcatagaccatcacaatctcatgttcctccgtagtcagcttctgctccaccgttctcactgccttggtcacacaatcatcctgactatccgaatcgatcatcatcccatcccctatctttacatcctcccgaataatcctctccggcataatggctatccctacaaggccaacatcagtaaccgtagcgctcgatcctatctttgatacaactcgagaacactcagccacatctctcctcatacacctacccctaactctctcacggaggtcatatcatctggacggcagatccaaggaccgtccctcctcctccacagactccctaccacgagatctcttcagcggcatattataatacaaacaaaaaggttaagatacaataatacaaacaaatgggtaacaccataatactaacacaataatacaaacaaaaggcttacccttttgtttgtattattgtatcttaacctttttgtttgtattatagtatgccgctgaagagatctcgtggtacggagtctgtggaagaggagggacggtccttggatctgccgtccagatgatatgacctccgtgagagagttaggggtaggtgtgtgtgaagagatgtggctgagtgttcccgagttgtatcaaagataggatcgagcgctacggttactgatgatggccttgtagggatagccgttatgcctgagcggattatccgggaggatgtacagataggggatgggataatgatcaatagtcaggatgattgtgtgatcatggcagtgaggacggtggagcagaagctggccctgaaggaacatgagatcgtgatggtctatgattatgtgagtgattcctcgggcagtcctaccatgccatcctttactcttacctcgtattcaccgatatcctatgagtcagacccggaggaatatgaggattcactgatttctccatacatcccggaggctgtccttcgttctcctgatagcccttttgcactgttatggtagggcacgtcccccatactccattttgcggttgacaggagggctaacactatttcgatagttggtgacggcaccaggtaaggtattcagataccatactgctttatatatggcgaagatggacattacccgcaggattgtgagttctatacagagtacatgcccatgaccattatctgtctctactgttgtgagtacggacactacgctgctacatgtatgctgttgagagatgatgctcagattcttgcaccaatccgtactcccccgtctcacgcagctggtccatcatccccagcgattcccgacaccgatgatgatctttttcttggttgtacctgatccaagtgtagtttaaggttattgtgattcccttaggagtcctaaccttagtaaatattaggaaactaacctcattttttgatgtatagcgatggctataggagagccaatagtaatcttcggttacattgtgatatcgttttgatgatgtctgtaggcttgaataagtgtgtgtgtacgatagccaaaaccacctttttcccttatggttgttaacttatgctatgttttattatgtttatgctaatgttcttttgtgtgattgcttaatttactttcaagttattaatgcgtttgtgtgtgtgtgtttcgtttcgtacttaaccaagtatcaaatcctaggagccttgcccaaaggaattagaaagtctagaaaacgggaagaccatttcaaaagagttaggaaagaaccataaaagttaggatggaaccttaggatcatagaccaagcctagtagtactaggaagccgagaatttaaagtcgttagctaaccgtatgaggtgacgctaaaaaaaatttacatacaaagaaaagagagaggtggagtctgttagtttaaaggcttgtatcaacttcctaaaagtagaggaagaggttgcaagaaataatggtggagaccatacctacaaaaagacctgttacccaaaacgagatccttagtataagaagctttatgaagccaacgaagaaatcagtttttcttaaggctaattactcccttaatccttagaattcaaggacgaataattttaaggggggaagaatgtaatgcccctgaccttgactatgacctggacggccggacgtgcattctgtcggataaaatgcaagatcaagccaatgcaaggcaagatcagtccggccaattagtgtggtaaatcatgggtaaggagcattagatatgatcaagtccacatgtaaaggaatgactctccatcagtcgggccgagcttatgtacgatgcgactgccggtaaaccccaaaaccattaggttagctctaagaactagtgtagcttaatgaaactttagtgttggtctaggaaaccttagaaggtcgggaaaaacttagaaggttgagggaaatccatttggaacagtccgatatgagaatggatcgtgtagatcgtggattaatcggacaatgcggataagtaatgataattggcctgctcgatttattctggcgcgaaatatattatagtccttagaaagccttaagttgtgtcacgacctcttgagatattggtgacggagaatgccgtctcaatgttcttgcggtccggtgacagatcgtaggttagggccaaaggttatccacattccgttcattatttaaggtcgtgcttatccacttttggatgatgtttaactaaaaaaaggaaggaaccaatcggaggctaattagtgttcggagctcccgtggaatgacacttaccacgatttgattcgtccagaccacctcgtgctttctctaaccgatctaatgcccctataaataaaccataaaaatgaaaaaaatatataagtgaaagtttaattatgtaagaaaatctacacatgtcagcatttctacacgtgatgtgtttagcttcttcctctttaagcaaacctgatttttgtagttttcttttcatttatagtttttcagtttgcaaacaaaatgttaggatcaagaaaagttggaggactcaaagattttatacagttcacacacgcctttaaaaccgagtcatgtaaataacctgattactgttttcacataaattgaaagattttgtttaactttatataaaacttggttcagatttgtaattcagagaaccgttttggttgtaaaagttgttgacaaaaacgaaaaaatgggatactaatatgtttgttagtgttgagaaaatgtgtagaggtaaattcgtcgagcataattgcataaaaatgtattacttcaaacttcatatctgtacattgcaagatgtcaaaaacattcgtagatcataaaataatatcctaaattatcatttctaaattttcagttttctgaaagaaattttaagctacaatgtagtcagtcatatgatatccaaaacaagtccatgtagttaatgtcattgggcctaaatgtcatatatgtaaactgaacttggatttgggctttgtggtgacataaacccagacattacaattgctcactggcccattaattaagcttgttacattgttattttttttcagcttgttaattgttatgacttatgatggtttttgtttgtattattaaaatagatatatctcttatttattgcagtttcttatagaatttcttgcttctttttggacagttactagctatataattttctttttcttcttatgaatatatatgcctgcgagagtctgcaactaataatgatattgtcgtatatgattataaatcagacaataatgtgacagccaaacttaaatgaaacaaaagagatatttaaagtataaattatgttattgtttggtcctactacaaaaacacaccattcaagcttcgggtcacacgctctgtgcatatcaaatgagtacgacctcacactataaatttttttaataatttttcaattcaaaattaacattaatttaaggaagaaatccaatttcattacaattttttttaaagaaaaaacactcagagtttaagacagattttcaaaaattccaaagatataaacaattactgtaggatagataatacaaagaactacggcaaataaaaccatgatatatataaacaactaatgcaaaataaaaccgtgaatataattataatttcatattatataagtcaatattaatgaaactatgatgcagcattatctaaatgaaaaatacaacccaattcttctgatttttcagatgtaatcgccgcacttctgagatctaaaaaaggaaataaaaactacagatttcagtgaaaattgatgttaacaaataacaatcatcagatgtttgtccaaaaaaaaaacaatcatcctatcagataaaactcaatctccatgatatttttctttaaaaaacaatcataccagcaaaatcaatattttctttaaaaaactaattaattatcgctgtccataaatttgtgtataatattaatttatatgatatctttgattaatcttgtacatacataatgaataattttcatatcaacaaaagtattttatatatctagaacatatagatttataaaaaaaaaattgatacaacataaatcgttatccgactcgtcaatagaacattaaaccgatcgaacagttcgtctaacccgttattatcattcaaaccataaactaattttgatcattatatatgctgtgttgatcatatctgtaatctgttaggtttgaaccatttaaagatgacctcaaactccattggattccaatatatatgatacagaattaatgataaaaaatagttgaatgaagaagtaagtagataggtcatatatatagctattaaaaaaaaaaagagtttagtcgagcctttgctttgatgtctgacacattctcaccaaatctgaggcagtcttctccagttccatgactttgaccattattctttctctttagttgttcaaaaacatacaaatattatagagtaaaaatgtttcatcacacaaattattaaaaatttctaccgacaaaagttggtaccgatccacaaatgacaaatccgaaatagatataaaacaaacgatatcatcttatcttttttgtaaaacaaacaaacgatcattttctctgtataattaattcctatagcagagaatgaactgaaatatatgataactattgtattattgatgaagtattagatcaacttactactagtatgccgtaaaatgttaaacactgtgtgtgtgtgttagtgtgtatatagagtggatgggcggtgggatcttagcaaaaaacaaaatgatgtaggattgatttaacaaattgtcactgtaaagagagagagagatgtctctcaactttcgataaagataaaatacttgcagaattatatcatggtttaaacctttaagccacatgcatgtccacattttctacgtacatacatacacttaaattttattatcatatctttgttatctaattttatacgtattgtattacgtgcggtcatgtacatattcgtacgtcaaatgcatgcatgcatatgtgaaaattaaagtaaagataatttgttttatagtttaacttcaaaattataaaatactatagtgttttttttgtatacctcgacaatttactaacgcaatttccaaagaaaaaactctggtcaagtgtcaaggtgagaaccaaaccttaaattgtgcacttatgtcataaactcctatatcctattctttattctttcttaatcctacaattttctatattgaagattattaaaattagtatgaaacataccttaaaatgttaatttatattttaatatatacaagaaatataattatactcaatatctaagttgttagaaaccttattaatacccatacacaaacttcctcgcttggatcacagccaaatattattggatctaaaattgtaatactattggcccaatcaaccaaaaccaagtttaatttagcaaggctaatacaagcatcggattcctagaagcttgtgggagtagggagagcgtgcatgaaagaatattttaaaagctaaataagtaaagaaagaaagaaagaaaaaggttagggttttagaaaagtcgggttcaagtttctaaagttaggcgcccacacggttgtaggaatcccaagcaattcaacatctacatatccattttgacatttttaatcagattctaagaatgatcaaattattttctttgcacacgtggggcagatttaagaattttccgatttatcttcatgtttttcataggaacaaaattgctatttgctagcatgatagtttttttttttttttggctttttgaagagttattactatattttaaatttaaataaaagaagtgttatctttctaatatgtagatttttaataacggttttttctttgtcaatgaatggggtagaaaaaaataaaagacatactcatgatgataagggagcggcctaatacctaaattcaagagaaatataaccttctgtagtagattagagtgtataaaaaattccatttaatattttggtcaaaagatatcaaatttgattagaaagtaagaccgaaaacaaacattggttgagttattttcttctagaacacctttatactttaacatacagtatatccataaatattcatatataactattaaattgtttacatatcaagtacaacacaactctattttccactctatatgtattacatagcatatccagatttgtaacatagtaatttgtgttgttactattgttaccattcagaattaaacacgtaaaacaataacaatgtaactatatgagttcatatatactccactagttaaagtatgaggtctagtattgttcataatgttttttaggatttaccgttttgtgatatatagctttataggatcgatagagaggtggtcaataactaaaggccaaaaaaaaatgttggaatgtttgagaaggggctgcttgagaggaacttataggtgcaaaaatcttagaaacacctctcgttacatgcatctgggaaggatcttaaatgacaaacatattgaaaaaatcttgacgatgacctacaaggccattatgtgtgaggtcttcatgaaaatttggaaagtattgataaacatattgaacttatagggactttgagcgacgatgtttatgttcattattttggtgaaggccattatgcatgtgtgaggtcttccgaatcggtgacctgaagactctatgaaatttacatgtaccagtttttaatatgtgcgtgtaagtaaactccttgtttccgaatctaatcaccaacaccgggtttaaatcttggtttttcaagtgacccttatacgtactttctgataaatgatatattttcccaagtaaaaagtatatgtagactttaaagatataaacaattttacatgaccatatgtttggccagttttggttgcatccatatatattttttttcttttctttgttgtcaacattcttatcgaattaattataatgtcaagtttactaatacgtattttgaacatagaaatcctagtatagagtgattaatgggctatgatcatcattacttagccaccgtattactgtatccttttgaacttcttataaagtttcacgtttctcacgaaatagttgattatttgagatacataataataagagctagtggagcttcataatcatccaataccataaccattcaaattatgtttatatataattaagaaaatatctaacttactgtgattaattttcattatatcatcagaggaacacgtattcaaaagccataaaaacgtttttttttatcactattttacggccattccaatccatttaatcaaaatcgtaatacctttttaatttcttgtttacatttctctaaattcggttgtgctaaagtggagactacaatggaacatgatgacacgtggttttacttgattggagtagaggccgctctgcttggcatgatgagatcatgttaaagaagatgaatgtaggaaaagagagcacatacacatatttcattctattgagcattaatataatacaatagtgaattaaaaaacaataaatctcttttggaaattgggccattcctccaacaacaaaacccacagttcccacttcccacttaacattagttctgttacataaccaatcattcaatatatatggattaagcttttttaatagtcgtttaagactttaagtagtcgttttactcactaattttgccaccatcttcactggaccactacctcatcaaaccaatagaatagttgaaagtgattatctaaaatataatgatttttagttagaggaacttaagaaataaaaacaatgggactagctgtatcatattaatgcagataagtatttctatatttttctagaaagtaataacctaaagattacttgtagtgggttttgtcgaatatcatcgatcataaaacatatgatctataaaactgatgttattctttttaaatgatttgataaaatatttccttgtcacaatacacataagctcttagctatctctgatctttctttttgttacgttgcaaaatattttgattgtaaatgttaataaaatgtggactcactattcattttcttcttcctttttctttgataagcatgctaagtagaccatacataaatagtgttgctttcttttttttggggatgagaatgaaactctttagaaaacagcaataaatatgcgaccctatttagtgtatatatgtaaagtgtttttaaaaatgtgtgggggatgaatatatataaggcaatagtgtcaggggtttagtcaaaaaaaattagctgcaaagtccataagagttggccaagccttgaaagaaaaaaaatcaatcaatcaatctctttacacatttcgtttaaatttccaattttatctctcaactccttccatcatcaatataaaacccaccataatcatgaaatgtgttgtaaatctatctatgcaatcgtttagatatattgacaaaaagataaatctagtacaagtcctgttttaatttcttaacgtcttagcttgaattccaatttaatgcatcatactttaaaattccatgtattttacttattaattttacttttagtagattagttaatatgctatggttgttatagtttggttatttggtggaaaacatgtcgtaagagtaagacttaatgttatggcatacaaactattaatattatgaatgtagatactttgctatgaaaaccccaaagtatatgatgtcaaaattgtcaaatataattgactgatagaaaaaagaagaacatgtatatgtagttggtgttggtaaagttgcattataggtttagaaaataggaggctaccaataatttatccaatgagaatattatgtagaaatgatgagaaaaatgttcaatctctttcaaagtagagcccaaattccacaatatgacaaatttgtgaggcataaagaattgagaacgacccatgttatggagggaatcctttttcctttctaacatttttaatttttcaaaataaaattttaagtacttataaatagagttatggatgttaagtagttataaatattaagtagttctaaattttaagtagttataaagaaaatttgaagtagtgataaataattgttttggatgttcattgtctttaatttttatttcatacttaagtaataataatatattattaattgttaactggttttgtatattatttttcattagttctttattttttattttcataaaaaaaatgaaaagacattaattattttcaatactgaattgacaaatttaaacttagataatctgagatttcgtacaatatagtatatcatacttaattagttgatgaatttcttctacacatagtaaaagagagaaatttcgacatacagcagatatttatttccaattttttgatcacgtaaatccatttactttttataaaagttttaaaatagaaaatatatgtatatttcgaaggaattatttttgatttttcctttttcatcaaaatgttttgaaattgctacttatactaaaatcttatggatttgccatttctcaactcttaaaactatacgtatttaggattttttttggcaaaaatatgtactaaactataaaaacaactgcaatcgactaaactgaaacataacaaataaaacgcatgttagatcatatttctataacctaaaaaaaaaaatcacaaagtattcaaaaagaacaaaatccgaaaataccatctaaaagataacaaattcataatttattctatttcgaaagggggaacgaatattgtaaagactaaaactttgttggcagatagaaaagaacgaaaaatgtaaactttagtgtaatttccttttttttgatactttaacaaaaaaaatatttgataaaatgagaagagaaaagagtaaacttttgcattgggttccattttatatcatagagttggcctttttgtggctgcttgtgggcctttctcatcagttcaccgaccttcttttacttccattgcatacttaaaaccattgagatacaacagtgattaatgatataccattcacaacatctaaaaaaaaagtgattaccctactttttactatccacaatattgatcaaatgtttatgtatttatgttttcttaaaactgattcgatatagatatgatgcatttttaaaaaatataggtaaaagaagtgaaaaatgataataaccgagatctttagtatagtattttgttatcacgaaatgcagtttcaatattttcgatattttatttattccaataatattctgtagttctattgttcatatatcgaagagaccgatcatcatcaattgtttaagcaaagatcaccgataatagttcacttatctcattcctcgacatgtcattccgataatattctgtatcttgtaaaaagatgatctatttatcttctctaacatatttcaaaaacttggtgaataaatatgatttatgtccagaaaaaagaacacgagcaatgactttacggtttcaatatcgttacggtggaacgagtccaacgttttggcggaaggctctttgtataattctactgtgaccaggaaagagacattaatcgcgggttcttaatagttgaagtgaaattggtggaaatgcatgcggaataattggtatcgtatttaataaatactatacactaaaaaactaaaaatatatacttgaaaaatacatacacagaagatcgaaaaagaaaaatacacatatcgtatatgtacgcgtgctttatacatgtaggacgatgtctcacgtggcatgcttacatcataaattccaccaaatgtatccaccattttcaagtagcatacaaaatagagtagcatatcatattaaacttacaattatattaaacttaaaattagttgaaaataaaaagccttcgaactaaattaatgatttaaaatatccttcaaaacatttttttaataccagagattttaaataatgtagtcaactagtcatgtacgaaaatctcacctattttttctttatattgtatgtatttttggttaaaatactttatattatatgtttctacaacaatagttatagttttatattttaatttatttctacaaattaaattataggcctaggcaagataacctttttcatttcacatatacaaaaaaaaagagaaagaaataatatggaaaaatggatactaatccccaactaatttttattatttgagataagaagtaaatattattaatacatacacagtagaatatggaactgtgatttgtcagagtccttcgctgtctaaattccgttatgactgaatctcaaaacattacatcacgcgctcacgtctcacgtgcactccaaaccttccggtcaaactttgaactaatccccaactaattttttaattactactctatgttttagttttaaccaaagtaccaaactagactaattaaataactaattatcttatcccatgagattacccatactaacataagtccaagaaaaaaaatattattctctcgatttgttttaacaatggtcgccaaaagtaagttatagattggttaaattttaactgaaagcagctcatattgcatgattgttttaactttcaaaattatagttgtaattttctaaaaaatatataggaaaaaaaagtaaggccccaaagaattgaaaccaaaaggaatggtcgatggttgagtcacgtaaattgtcgtatactcttttaacaaaacaacaacaacaacattgtcaaatctctttgcaataattgttcatatccaaattttaattacttatttcatatatttatttcaggcttttaaaaagatactcgatcaaacccaaattttatcttagtttgaagtggtaactgatatatatgaatagttgtacattaaaaaatcgagacaaaacgaaaacaatttaaatgtctaaagaaaaatcactaaaatagatgtttattgtgaaagaaagctataattgaatcaaattaattcaaactattttataaatttcaaatgagggataaagtttaagacaaactaaacatttaatgagagtaaaaaagataatattttaaatatttatatcgtttaaagatcatgttagaaaaaagtttgttagagagagaatcaagaaatatgttattctcattaatgaatgttgtttacattcattttatacaatgagaattctatgatgcggtttactctggtttatcaatactagattacaattaccaaattatttatggtttatcataaaccaaactctaatatcctccttcaagatgacaagtaaatcgatttaagtgacatcttactaataaactgagtagggaataaaagttttgtgaagacatgaataagctgttgatcaatcttgacatgtaaggtcttgatcaaaccgcttattactttgtcacgaacaatgtggcggtctagctcaacgtgctttgtgcgttcatagaaaatatcattattggtgatgtgaatcgcagccgttgagtcgcaaaagaaagccacatatttcgtttgaggcgcatgaaactcctttaacaagtttacaagccaagctacttctcgaacaacaaactccattactctgtattatgattctgcagatgaatgtgatgcagtttgttgctttttgtatttctaggagataaaagaggtccccaagaacatacaaaatccagatgtagatcgtctataatcaagacgagatgcccaatctgcatctgtttaaacttggagtaactagcaaagcttgattctctctgtaacaaatttcttctaacttggctctgataccatgttagaagaaagtttgttagagagagaatcaagaaattctgttattctcattaatgaatgttgttctgattacattcgtttcatagaatgagaaccaagatcctgtttattaatacgagattacaattaccaaatcatttatggtttatcataaaccaaactctaatagatcaaaccatatatgatcccactttcaaaaaaatctcttgaaaattttaagactgtgataaaaaaaaaaaagtattatattcaataagagaatcatttttttttgtgtgtgccagcaattagagaatcataaaaagtaatcatattccccacaaaactctaaaccgtaatataataaaaatcaccacgttcgtttgtgtgtaacttaaggcaagtttttgaaaatatcatacttttttttgcattcacgtattctataacagatctaattttcacattaaaccaaaaacatatacatttctatagagttgtaataataacaaaaatatgaaataataacataaaaaataaaaggcattaaagaagaggaagaggacacatgaatttcagcgttatttttcaaacttcacttcatacccgcgcactaacccatccatacgttggccgattgaaaataaaaaacctagagatagagagagagagttcaaaaaaggtatcatgtggaggagagagatagagagagtaatgactaatgagaacaaattttcttatagttgcaaatggtaacgagaagtttctttaaacgaaaccaaatgttcatgaatcgtttaatcaacacaaactcaaaaacaaaatccctaatttctctatttgggtaaaaaatctcaactttttgttttctttctatctataagaaatctctttcccttttaccgttttctcagtcgcaattcaatctctcttataaaactcagaagaatttgccgattagtgatgcaaaaaacgagatcctttaagggtttttgatttctttttagttttctggaaaaagtttggatttttattttaattttctcggataagagaaaaaaagtgtgaggaggggtctctcttctttgtgggatcgatagagatagtttttgggttttttataataaaggagaaggagcgtcgaagctaaaattaacgattagactaaagaattttttacagacgagagagcgtcagagagagagaaaggccaaaactttttaatggaagagacaactaagcagaacaacatgaagaagaagaagaagattcttcttcattccgatgattccaagaagaaggagcgtcatattgttacttggtctcctgaggtctctcttctcttctctcctctctatataatattgatcaatctctgtttttttagtattgatgattgatgaatctctgttttgagattttcaggaggatgatatactaaggaagcaaatcagtttacagggaactgaaaagttagttttcaatttcgatttctgggttatgtttctgttctattgggttggttgattttgatgaaaagttttgattttgttgttgttcttgttgtggttggtttttagttgggcgatcattgcatccaagtttaatgataagagcacaaggcagtgtagaagaaggtttggtttcgttaattaaatatcaagacgattgttttctgttgtgtttttgtgtgtttgatctgattatgtgggtttttgatttattgcagatggtatacatacttgaactctgatttcaagagaggaggttggtcccctgaagaagatacacttttgtgtgaggttagacttcttctttttctaatcacatagagattatagagtttgtgtttgatcttgtgtgtgtttggttttgaaggcacagagattgtttgggaataggtggactgagatagcaaaagtggtctcaggaaggtatattgaaacgaagagattcaagctttaatggtgaatgaagttattatgaaaatgaaatttgagaattcattctttgttctgtattgtttgtgtagaacggataatgctgtgaagaacaggtttactacactgtgcaagaagagggctaagcatgaagctatggcgaaagagaacaggattgcttgttgtgttaactcagacaacaagagactgttgttcccagatggtattagtacaccgctaaaagccgaaagtgaatctcctcttactaagaaaatgaggtgagagaaccttgtgtttgtttatcttctggggaccattgattgatccaaagaagaatgcttttggaactgttatattgacttatagttgtaaatggtaatgttcattatccaggagaagtcatattccaaatcttacagagattaagagctatggggatagatcacatataaaggttgaatcgactatgaatcaacagagaagacatccattttctgtagtagcccacaatgccacaagtagtgatggtacagaggagcagaaacaaataggcaatgtgaaagagagtgacggtgcgcaaaattcttcttcatgttgtgtttctattaagttgcaaacatagagagtcttattctattaagttgtgtttctgctaaataggtgaggataaaagtaaccaagaggtgtttcttaagaaggatgattcaaaggtgacagctttgatgcaacaagctgaacttctcagttcattggcccagaaagttaatgcagacaacacagaccaaagcatggagaatgcctggaaggtaaacaatgtgcagccctgctgtgattctagactcattttgttctgtaacttctgtaaatgaacatagtcttgcacgatcctttatgagctttctaataacaagcttttgtttgttgttcctaatatttttaggttctacaggatttcttgaataagagcaaagaaaatgatctatttagatatggaatcccagatattgatttccaactcgatgaatttaaagatcttgttgaggacttgaggagtagtaatgaagatagtcaatcatcttggaggttctgaaaggacatattttcatatatgaatgattatggtttttgatcgtctaaatagccattgttgtcacttacaggcaacctgatctccatgattcaccagcaagctctgaatatagctcaggatcaggatcaggatcaaccataatgacgcatccttctggtgataaaacccaacaacttatgtctgatactcagacaacatcacatcagcaaaatggtggggagttactacaagataatgggattgtgtctgatgcaactgtggaacaagtgggtttactctcaactggtcatgatgtgttaaagaactctaatgagactgtgcctatcccgggtgaagaagagtttaactcgcctgttcaagtcactccattgttcagatctctagcagcaggcatcccaagcccacaattctctgaaagtgtaagtatccacctaacaaattgaattgtggaaaactttctggtttagttttatagtaaaagaaacctgattgatctgtttttgcaggagaggaactttctgctaaaaacacttggtgtcgagtccccatctccatatccaagtgctaatccttcacaaccacctccttgcaaaagagtccttctcgatagcttgtaaaccagaccaaaccaagctctctaaaccaaaaaaaaacgtcccaaaaacctcggttatgtcctcatggaggtgggcataacctgcatttcttccctctttttgcttagattttctccataggtttgcagccatatcggcctgaaaagttttagtgaagcgggcgtgccatgatctgcattttttcctccctctagaatctagaatgttaaaggtaacatttctaaagtctagacccatctcagaagctgagtttctctctcagatactcaggattctaatcttatcctcactcattaggagagttttctttccatcatcatactcaaaagccattccataaaaagggctaaaaaagtatgagttttttcttccattcatgatttgtgtgtctaagaaaaattctttcgtttgtcttcaagggtcagacccagatacataatcttgggtttgtctcccccacccatgaattcttgatttgttgttttcttgattctctgtacagaacctatattcttacataaaaaaaaaatagagtttttgtttcagagtgtaaactaaaggaaaaagaagaaagaaagaaacttcagagagaggcatgtcgcctttctgtatacagtaatgaaatacacagaagaaaaaagataaacaaagcttttcatatggtttttgtagcaaaacattgtagtgttgttgtagtgtataacttctcataggtttgagaagaagaagacaaacaaacataaaaggaaagaaaaattatgtttgtttgtcataaattctttccctttgttcacttctcagaagaatcatgtgatttgtaaagagattatgagtggaaatgaattgattttggtgtgaatcatagtgtttcattattattattataaacgtacctatgatttttcaagatcatcttctccttcctctgtgattacagtagcacaatgaagaagaggttttcttaattggatctgaatctgcttctcttataaaatgggaggtgtttttaagttgttagtgtgttagttagtggaagacaaaacgtaatcatcactttcttcctaacttttgttttaatttgaaaatttcaacctccatttccttttgtactctactaatccggttttcaattaaaatcattgtcttcaaaattgaacgacaccggtcgtatcaatccgaccaagattcgtttctttggtccggtttacaccaacccaaatttctcttatacgctaaaagcctacaatagtgagctgacttgaataccaataacttctttatccacaaaattcaaatcatatattttagtgattagtaatgttacttatacagttaactaatctggtttgagtttctttgtattgactagtgacataaataaactaagaataactgatacgtaatttagagatatgagggaaaaacttcaactcttttgcttcttcttctccactctctgcaatttcttccatttaagataaatttgatatgccaaaccaccaaagaccatcgaaacacatccccattgcttcaacgacaatggatttccgctcattactgatgatacaacaatgctaacaaacttcctggtcgtggttatggtcgtgttagctagtgacccgaagttacttattgtcatgaagatgaagttttgtcccacggcaccgcatatacaatactttagaatgtcccatgccgcttccgggtgtagcttacagaactgaattgctttgaatcctatcccttgtggcaagccaaacatgtagatcatgttgtatattgtgccccataagttcattcccagcattatgtcccacgcttcggttttcgggtacctataaaaattcattgtgtggtgacttgataaaagatggaagattgtaagttctatgttctgttgcaatgtcagatcaatatataccttgaggcaatggagtcttgtgtggcatttgtgaatccgtcaaaggcgaggtttaaggaacaaagtgcgtaaccgaggggagcatttggatgtgctagcttgctaattgtcttagagcttgtctgaaaaaaataaaaaaaatcaaaagatcaataatgtgctgtgatcaaagtttttggatgagtagatttacataccttaagaagagcaaagatggatactcctccagcgacaagaaaggtgcacatgtattcagggaaagtgtatcttattccgtaaactaaagttcccattagcataactacatcacaaaaaggaaatcatgaataagataaacagagagatcttcttagaatagagtttcatcatcatctattcgagatcataatagatagataccttacctggaatcatttttgacgattttgccaaaacctgcaataagcaagatcagaattcaacccatcatttacctaagaaacagttcataaaccataatctgagtattactactgatgaggtataaagttacctgagctggataactgatatacttcaaggcttcaattcccatggcaggaccaattgtattagtaatgcctgcactccaatacgtccaccatggtgctccaccgttaccagcatttgaccagagcttgatcactggacattatcacattacagacaaatacaacatttcagctccattagtctgtattcgatgataacaaagtagagatggaattgcacaagtgctcacttatataagaccagatcaagcagactacactttgagctaagttcaagaatgcaagatgctcgaacctcttctcatctggaccaaatctcttcgtggacctaatcagataaacgaatttcattagtccatgtaccaagaacaaattccggcagctatgtctatagaaattcaaaccacagattgcgaatagaaacgaatcaatgactctgtagcaactatttcgcaacaacaagctgaatcgagcaatgaagacgacgagaatcgatatgacctaacaattttacttacagagtctcttgaagaacgccttggtagatgtaggcggaccagatcccggagatacacaacgccaacaacagaattcgacggaatccggagccatggacctccatcgccgctccgggaaacgctcccacaccggcgatgattcttccggcggcgcttcgattcgaatttcactgatcgaatccgagaatcgcaaactaaaaatgtttgttttggatttgggaagatgaagctgttacaaaggcgcgaaaatagatacgtcgatgttccacgtggaagctaatcactggactgatgatctcacttgacgtttctgattggttaacgatgacgcgtgtacttttggagtgcagctcgtgaaatggtttccgtgtttgaattataaatataaactacacgccgttttctaatcgtaaaaaccacacgctagtctttgtaagttgcaaaatgatggaaagtttcggtgggtgctttgaagttgacaaaaagtagagtcacatcatttaagggtcgttaatctttgatttagatggagttttaagagttttaatctctacttaagtgttttgattgaatcatccaaacttcaaagcgacaaactgaataaaactcgtatgttcaatttatggattttgataaaatattaaaccaaagatgataagatactaaagagtgtaaagcaaagatagaattgttgacaaagaaaagattgaaagtataaatatgatagcaaataaaataatatgcactcaaacataatctataaactacgtttactacttttttagtccatgatcttttttatccataaatatcataatgcatcgatggcatggatagataatatggttgacaaatctatatataagaagagtttgaaatagtcaaaagattactattgaatgcttctttttgtcgtgtttatactattcacatgcttcgtgttaaaaccttaggatatttatataaatcacttggagatatatatgtatcaagttgcaaaatacggacattaaacttttaatgctattcaattgccgacaaaagaattgttatagtacaattttagtaatctgagcggcacaaccgtaacttgtctcactgaaaaagtaaaatgtaaacttaaattgtgatgagtgatgactgatgaccatgatatgtattttaacttcatcaactcataatggatgatttcaacactaccccgtatattacatgtttacaattataattttttttttttttgcctttcttctatgacaacttttagtggaatcatgatttgtgttaacaaattttacaattccataaaatggacgaataaataacacattttactcatttgataatctatttttagtgattgttctggtaaacaatgctttatgatactctctttctttatttttaaatgatgttttagttcaaaaaaaattgtttcattttaagtgatgtttttaactttttatgcaaatattaaatatatttaataatttttgaacaattatttttattggttaaattcattctatttaataatatttgtatagaaaagagaaaaattatatatttttttaatctgtgtgtaataaccttaaacatcacttaaaaagaaactgaggaaatagtaatttgcaaaaaaaaatcattattcgaatatcatttccacgtgtcaatgtgtagtgtccaaaaaaagctcttggatttgtcggtcaaacataatgtgaatgatagaggaattctttttggggtcaatgcatgaaataaagttttttttggttaatatgaataaagttttgatacacttgaaattaaaatattccaaaagcgtgttaactaatctctttctataattaaacagtactaaaccatctgtactccaattcgaattaattaataaaaaattttacattatctaaaaatgacaaaaatttaatggaatcttttaccaaaaattaatctttagatttgatgcatcttttaggagttttgcttttgcttaaaggtgaatgtaaaaaagctttgaagaaaaaatctgacgtggatctgcttacgcaagcaaagacgttgccaggtggtccagatctactaacacagtattttaccaaactatccctgattccccttatttgatacccgcgttaaaccaaaaatattcgccgaaaggaagggtagtatagtcatttaagagaaaaagccacggaccacggcgaacaaaagcaaacaaagggcagaatcgtaattttctcaaaaccccaccaccaacaccacgactttttgtatgtatggttgtgctgtgattctctgtgttccttcttccttccttcttcttcttcttcttctctaattctggtttcaaaaatcttctttttcttttctttagttggataatttagtgattataattattacaatcagcttttgcgccgcagagtaaacaaaaaaaaagctcgttggctttgttcctttgaatctgttgattgttttatcgagtgagaaatgggtaattgcttagattcatcagctaaagtggatagtagcagccacagtcctcatgctaattctggtaactttcttttaattttctccatacctctaaagtttcttcctttatccaaatttcgttgctgcgtaagtttctgtttttgaaaatttctccttattctctaagatggttaagattcgacttttaggcttttgttctttgtctgacatcttcaaaatcaaacctttcgaaataccaatttctgcttatgtctgatttctcttagtaattttggggttagatatggaaacatttggtgtttgaatctatatgttactccattatctcactatttgactgtttggattgttaaatcttcaatagttatcttaaatttggttttagattgttgaattggttaacgttgaggattgaaattcgaaatcaagttatgatcatgctttaagttagtaatcaatttttatagaattgttaagttagaaatcaatctgacatagatatttttatttgggatctcttttagcttcattgagctcaagagtttctagcaagacaagtcgttccacagttccttcaagcttaagcataaattcttacagcagtgttgagtctttacctacaccaagaacagaaggagagattttgtcatcaccaaatcttaaagctttcacctttaacgagctcaagaacgctacgaggaactttcgacccgatagtcttttaggtgaaggaggttttggctatgtgtttaaagggtggattgatggaactactttaactgcttcaaaaccgggttctggaattgttgttgcggttaagaagcttaaaactgaaggttatcaaggtcataaagagtggttggtacgtctttgtttccttcattctcttattgattttgatcatgaatggtgttaacattgtttgctgacatactttttttttggatttgtttggttttagactgaagtgaactatcttggtcagcttagtcacccaaatctcgtcaaacttgttgggtattgtgtagagggagaaaaccggttactggtatacgagttcatgccaaaaggaagcttggagaatcatctttttagacgtatgtaaaacctgtgattaccaaagcaatccttttcagaatcagcaaatcttatcttcttctttatactcttgttttgtaatccttgtcaaatgcttttttgatcttccaggtggcgctcagccacttacgtgggctataaggatgaaagttgcaataggggctgccaaaggacttacttttctccatgatgcgaaatcgcaagtgatatacagagactttaaagctgctaacattctacttgatgcggtaataaacctgagaaacctgacgagtagcctctctttaaccccttattcgtgatgatttgattctattttctaactagcttctatatcgatcttaatcacaggaattcaacagtaaactttcagacttcggtctagctaaagcaggtcctaccggtgacaagactcatgtgtccacacaagtcatgggtactcacggatatgctgccccggaatatgtagcaacaggtgagaaactttggatttagcttttaaaccctgttcgctacaaaaacattagtctctctttgcttcaaaagccttggcctttacttcaaaagctttggcctttgcttctaaaaagctttatcccattgctttaagagctttagaccttttcctcaatacccttagcttcgcttcaaaaggatttaagcactttgtttcaaagcgttcttagtactttgcttcaaaagctttcttctttgcagcttatacacttcacttctatcttcttagaactctttagctcatatctgattttcatctacaggtcgattaactgctaagagcgatgtatacagtttcggtgtggtactactggaattactctcaggacgaagagcggtggacaaatcaaaagtgggaatggaacagagtctagtggactgggcaacaccgtatctcggcgacaagcggaagctctttagaataatggacacgagattaggcggtcagtatcctcaaaaaggagcatacacagcagctagtcttgcattgcaatgcttaaaccctgacgcaaaactgagaccgaaaatgtcggaagttttggccaaattagatcagcttgaatcaacgaaacctggaactggagttggaaacagacaagcacagattgattccccaagaggtagtaatggatctattgtacagaaatctccaaggaggtatagttatgatcggcctctcttacacataactcctggtgcttctcctttgcctactcacaatcactctcctcgtgtaagataggaatcactgtaatagttatcttttgtctttgtctgttgtatgctgtttgtaaaatgtgttgtgtaatggaccaaagtttcattcttggctcaatttataaaatttggtttcagtatggtttgtttggtactgaaagatatgtaccgatccacgtaaagacagagacacgaacatagggttaaacccaaagttttttattaatcattaatgtaaatgcagagacatacataggttaaacgcaagagactcctaagaaacacaaattcataaataaaaccacaaatccgaaaagagtcaaaggattgaaacacaataatcctaagaaacaaaaatccaaaaagtcaactagatagaagaaaatacataaacagaagcaaacattgggtgtttcaagtgttaaatggaaggagcggtagcataacgttctttcaatgcgttaaccaacgtgaggatgcttggattctcaggctcagtcacagccaaaatcattgctgcagcaagaagagattgtgtactttcttgctcattcttcattgcattgagcaaggatgtcatagcttcgttgggcttgggcggctcattcaagaccccaacagagagccggtggatataattgaataatcccataaaagcagagaccccgcaaatgcacatgaacaagatgcttatctgctgaaacattgagaaaagcatagcccatagagccacatagatggagactatagagatttcatcaaataacctgagcttcttgtgtttggccctcaaagcagcatcaagggcagagaaagaagtgaatatcatacctgcccaaccagcagcacgtcgagcaggctcgtggtggtgagcagtgatgtaatcttatacaccaagattgaaatacagcaggagaatggcaagaaccctaaaagcaagttctttgagaatggtggagacaatggtgtactcaccatcagtgtagcagttaagccatatggttaatttaaacttcattttgcaactctagctctctgtgaatgaaagaaagtctctcaagctttattttttttacatgtttttgatactacaaaaacgagtccttttataaaacgagcagaacaatctggaaccttatccagctgtccctctgagaaaagttgaatctctgtgctagctctgaatttttcgtcctccttcaccacaccattgtgaccattgtgtcgtactatgtctcgactcttgacagcatgagtctctttctgctttaattttactagatgagtacccacgctacgcgtgagtttgttttgaaaattgttaaaaaaaaattacattgattgttctttatgctaatttatatttactatttgtttattctagtattgttaataaaattagattcataatatgtagttacaattttatggtttagattcatttgtgacttgaaatatcaatttatatatttttgtgtataaagctgattatttataagattttaatattttttcacttcatgaatacatataacaataataatgatattttgatacaattctatgtaactattttatttttgtggtttaaaattttcctaactcgattatacataaatcaattccttgttttatgtacttcaacaacattgtaatagactcatgattaaagtttcgatttacatgaactgaaaaagatctgaagagtattcgtacaaaaaaataaaaagatagcaaaaattgaatgtcattgaagtcaacacttttggatattttgtcattgcatatatcaatattagagaaattatcgtgtcttggatgatttgaaaattgttcaacttaattataaataaactatttatggttttatttattctccagatataatactccaacaattatgttataggctcatgattaaatatatagaattgatataaactaaacaagatttcaagagtattcatatgaaaagaataaaaagaatgcaaaaattaaagtatcattaaagtcaatacttttagatcttctgtcattgcatatattaatataaaagaaatgatctatattacattatttggtaggtctaatattttgaaggtttattatttgaaaaaacatgaatgtcaatgttatcaaagaatcaaaattaaattactaaactaataagaggttaggtagcaaacaattacaacacaataaaaaatttagtcatgattattgataaaaaaaattaataaaataaaaagagtataatgaaagtagtacttaatttgtttacataattttattttttatttttattttggaaaaatcaattaagagtagaattgatgatatatttaatttgcttatttaattttattagttttattaatttgaaaaacatcaaataacatatgtcactttgttgtgtgatgatgtgtcatttatatggagagagttaaccaactttcatatatattatttgggctcttattgggcttttgtaaaaactaattgtggcttcatgtcagagaacctttattctctggcttcaaattgttttcacattttcgtgtattttatatttagttaaattgtgaaagatcacatttacatctcaatataataataatcgataatgtagttactttttattattttttattcacaggataatgtagttacctataatataatacataatcctatgaacaaagtatatagtagaataatatttctaaactaggttaacgtagaatcatatgaagagctaccttccggacgggttaattagaattacctgacttgacctatataccaattccagtttcccatcttatgtatccaaaggagcctgtgttaattttgaaaaacatttttcctagagagcttcaaaggatcaaagccaacaaattaatatatatatatatatataaatataatttatttattttttatctttttttgacatcaagaactaaaataattcagagcaataagtacttaaagttatatatggaagaaccatctaaatatacatttttggtagactttttggtcaaaaatgtctatactatttactattaaaattctgctccttacaaattctatctcaatcaaatattttatttctaaaaacttacaaatcgttaaattgcattaattctttgaattaactctttcttaaatttttatctttaactaaattttatattcgattaaggctaattttctaaaatttctatattgaaattaaatataaatatataatttgtctgtcactatatttgttattatatctaatttattttaacttatatataaaatacatatagttaataaaatattagtttttttcctgcatatggtgtaattcaaatttgtaaaaacagacatataatattcaatcgataaaaaaataagtatacaagggtataatattataaaaacaaataagtgtacaagggtataatatcgataaaaacaaatttgtaaaaacagacatataatatttttacttttttataacagctgagtaaatatttctataatataaagaatttttttaacgcctgaaatttatttagatagtaaatgggtaatagaacaagtttatcaaccaaggaggaggaatagaaagaagatgatacacataatcaatcgaagaagcatgtctacctagtttataacttgtggtttataatataaaatatttgtttaataatctaatttataatagttgaagaagataagaatggggaaaaagagaatatattttggtaatatttgatctaatccaaacccttaaatatcaccgtgaattataaatacaactggaaaaggtttcattgttcaaacatcaacaagaaaaaaattcataatcccagtaaaacttgaagtatggacatctcactacccacaaatatcgtcaacgaatctccgagccggaggcgtccatggtggtgagtaccatcaacgaattttcttaacgttgattttctttttttgtaactaaaaaatataataacattgtttggtgggtggatgcaggcaaaacaaattcgtaatttacgacgttgccatgaacgtggtcttgatagtattaaatattgcagctttcttgtatataagacattacaagcttcccttagttgcaaaaaaagaccacatgatcgaatttttcgttactctctacggcgtaacaaccattgctggtgtggctatatgggtttacatgttcaagaagatccccgaaagtccttacgaaggcggtgccatgagtatttctcatatgtgcggcgttgttttactcactctcttcctctattcaatttctcttatctttgctctctgttttggtataccgtctttctcatggtttttactcaattatttatacgctgaatggtcattaaatagaaactaggtcctggtcatgcttgtatgctgctatgtctaacggatcacttttataaaatttggtttgttcagtgctaaaactaaaatgcaaaatccaacagtacaaactgcaaattgatttgaaaccatctcttacagaaaacattttaaaagtaaatcttcatatatcttctgaggcaatgtcgttaattggtgaccaaaccaaaagctggattttgtacattggtaaaatttggtatctaatttaaggcatatattcgatcgcaatatgaaatatattttctaaatctcgattaattactaaacaaatttccagaaaaatatgatctaatctaatcctaaccataaactactactttatatcctattttccccctaaattcgtgaatcattaataatgttaacaatcaagaagatattcaagttaatatatcctatatttttggattcggcttcaagattttcaaaattttatgagccaaaaatacaactttaattttttcgcatttctgtaattgtactttaactataataatacacatgggtaacccaataaatttaccttttcctaactaaaaatttaacaaccatcaaaaaacatataaacactttttcaaaataaaaaattaaatattatgaatcatataatatgaaaaatcaaccttatagattttcacatttttaaaaacacgaactataataaaattagatacaaacttattaactactacacatttttaaacacaacaaaacacattctcataataaatatataataaccactaacaaatatatatatatatatatatatattaattataaattaaacattttaaatatttaataaaaaaacaacccgaaaacaccgcggattggatcctatacataatcatttagtttatacgatattaaattttgatacatatatatataataatacatatggttaaccacaataaaaccccttctcctaattaaaaatatatcaacaaataaaaaaaacatattttataaattatgaatataaaacattattaaatacttaacagaaaaccgcataaaactgatgcccgcggtgaaccgcaggttgaatactagtatttactaaatgaggagactttataaaatttgattgttctcgatggacctttgaaagtatgtgggcagtgtgagacgacaagttgcaacaaacaagaggagaaactgctgagcttgcacaagcgaatgtctaacaaataaagctaatatttccttgttcggtgctgaaattgaaatgcaaaatccaacaacaaactgcaaatgataaaagaaacttttaagaactatttacttaaaccctacttagtttgtgaagacagcatcagagagtaaactgaagacaacatgtcaaaagactcatcacaccaaaccaaaataaaaaaacaaaccaaaccaaaacaacataaaaacagaaaaaaaaacaaaaaaaaaaaaaaacagttaaaagtgatccaaaaggtttcagagctttgttcaacactgtaagatgatgacgatgcctctatggattgatttctcttttgttcactcagctttcgttgactcaccgtttccactcagctttcgtcgacttgtctgatataaacatgaactaaatttgttaaaaggatgtagataatgtaaaagaaattgacaaaaaggcttgtgtatagttataggtttaaacctcttaccaccaatgtccttggaagatgaaaaagatctgtcactgttcattgatcctttggctgaagctatgagaagtctgtgagctcttggagacattgtactcagcttaccattggctgcaggaggaagagagtggcgccgtgttgtcccatttttctcaggcttctcttgagctatcctcggagacccttgtcctcttattcttgcctttgcagatgcagttggagccatatagcttgggatttttctcccactctgtgtaagcccatcgtcttgatgatgattttcaatctttgcaggtaatgaagctcgtctatcgcttggctttgtgttctcagaagcaacatttccattctcagagcttatctgcgcgtctggctcctggattttctcttcagcactatcatctctctctgcagtcttgagttcctcttcagctttatcatctctctcggcagtcctgagttcatcttgctccggcttatccaggaccagtgacttctcatctttatcgagatcagactctttcgaaattgttacagggataagattcatcttttcatcttcaggagcatcaactaaagaaactgaaacctcttcaataggcaattctttctgcactgcatctgcaatctctttcttcttctcagctgatttgcgggtagctttccctatcccattagaaagtgaagcctttttatgactaatcctaggcttctcatctttaacctccactgaagacccttcctttatggcgctagtactttttcttgaactctgcttagacttgtcgttctcgattttcgaaagttctttaccaagtgtggaggccttcctcacagttcgcttaggcttttcgttgtcagctgttgaacggctagtagagctgtttgcagtagttgaaacaccggttggtttcctgacacctctcttaagttttcccttttccgcttcgactgcttgaaaacttcgcttctttgtctgagattttggtaccagattcttaaccaccaatggaccaggagcccaaacctgcaactgcgtccagcgtccaagccacaccttggctgagttaggatcttcaggactatactggatcttcagaggcaatgttgttggtgacgaaaccaaaagctgaagaagtcacagaaacatataattaagagcctgtcacagaatcacatagcaaatattgatgttaccttatcaatcattgagagctttgtagggttctccatccaactgtatgtgcttccttgcaaagtttcagaagtctcggtttcctaatagacgaaagaaattacagttttaaaagcaaaatcgagcaatggttatcaaagtgtggaactacgaaactaacagacactaaataccgtatttgttttctgaagttgagccacggtttctgaagatctagctttcttcccgcgaacaagtgcttgtactttcacaattccccaaatgcacgagtaagtagcaacagcttgtcttctgaccaagtgaccacggataactgcttgcacccttgtgatacctttgaggttctgagattcttcacgggcctttaagaaaacaacaaaagtatcagcaaaacaagacacacaaaaaccattactagaatgtcgaagatatacacattcacctgctgagctctcaaagcagcttgaacctttgtagcagcttcttcaagcttgacttcttcagagtcattccctgactcaagattcacattcgatgactcatcgccttcaatgtctccacttagttgcttctcagcaattacaacatcaggaacgaccacagtttgagtagctgcaacttcttgtgatgaaactacaggtggttcggtaggtaactttgagacattattatccttcaccttcaccacaagctcttctttctttgcagatctcttccaaaacatgaacaatgtttacaattactcatcatataattttcccacagaacaaaaaaaaaaaaacagaacattcactcttcttaccaatttttcgcctcctttctccaaactcgatttcgatgacttctttccaagaagagacttgatccatttaccaggacttggagtctttcccatcttttctaatggctacaattagaaacttgctacaaaaatagaaacctgcaaaaccaaaacacacatttcgtcttaaaacgaaaaaagcctgacactttcaagtaacacacatcaaatatacggtcgcaaaagtcatggaagcatcaattttacacaaggctgaaacatattccataactagaaaccctagaaacacacacaagacataaatcagagagagagagagagggagattaaacctaacagttacaaacaagacgaacacagacatcgacggtgcagtgattaaagcaaaagtggcatgaatcaaaagagagagccgaaaatcaaaagtaacgaaagccaaagaacccatcaactaaagtgaacaaaagcagagattttgaagattacaaaccaaaacccatgtcgatttagcgggaaaaaacctaaatttcatatgaacaaataccagaaaacacacaaaaaccgtttcgttccccgaacaaaatagagatacaaaatcgaaaagagagatactttgtaaccaaaatcaaagcgaagaagaagatggagtaacagtgaatactcagatctgagtagaagaaatcaaaagcggaaacatttttttgttgtgagtttttttttcctaaaaagtgtacaaaacaagaatttaaaatgtagaatctgaaatagagctcacaatgtagcgaatcgttactgttatgttcttcaaaatgttgtcttgttagaagggtcttcgtcggagcagtgacctaaaaaaccaaaaagtggttacagtgagaaattacactcaccgtttgtaatgtgagagagagataaaaacaaaagcagagaaagcggaacaataaaggcatgatgaaacgactgtgttttgtctgatttttaataatgggctttattagtgggcttattggtggtatgagcccaattatttgtacaatgtattggaatttatttaaatatctttattttctagttgagttaataaaaaaatttaattgagaattaatgctgtcgttattcaagtggttaatctgctaattcccgattttgaaacgcattaaatgtttgttaattacgtttattcaaattgtgtaagggtggtacaataagtcaatcaaccaaagtggatgaacacataatgaccaaaaaaaaaagaaactttcttttttctttttattgtagtaatgaattattactacgttaactatgacattatctatagtacacactaaattttattagaatcatcgttctgtcaccatctaaattaaaattaaattattagaatgctaagtgtcatatcatatgatttagctataaatagttaaccaaaaaaagaagctataaacatataatactttataatcttcacttcatttacaaaaatatactgctaaaactgtaatttggtataagaacaactgatacttgaatttcaaattatttaattaacagatcaagtcgaatattttataaatattatcaaaagctgattaaaacaacagaaagactcttttcattctcgttactcaaatcgctctgttgacgtacataaacaattgtgtttactcctctaagtctatctcatattgacttacataaacaattgcccaacaaatgtctatattcaattaaaagcaacaaagaaaaaacactaactaaaaaaatagaatcataatctgaaacgaaaactaactttttctttgtctcaatgccgatcaattagcctccatgagcagtaatcctacaattataaagaaacgtattataatggttaaaactcttgtcatcaatccaaaaacactcatacttaatcttagatctcaatttgagataaattcgaaataagcctagatttctaagttacaacaaattttattgattttaatcaaataataaaaacatataaataattatttcattcacataaatatatctaagaaagatagacacacataattaacaaaagataaactaaatcgtattagagtcatcattttgtcaccatccaaattcaaattaaactattagaatgttaagtgtcatatcatgtggtttagctataaacatgtaatactttataatcattttaagttatttcttattaccatcattcactggaatttgttttacaacttttgtacagttgatctttaataaatgagctaaaactaaatagaagattttaaattttgatgattgtctatatatttagtgtaaaacagtaaatgaaaggcaaaaaagctgcaaatcagattctgaataaaaaacatgttatgacgtctaatcaaagttttaggatccgagaagtttacttttcttgaaacacaataatcgaaagttttgtttaatcaaaagaagctcataaataaattctaggatcctaaatagctaagtaaaaaacaaactgaaatagattacaatgaattcatacattacatttttgtagtttgagaccctagaaatacgatcttgttcctcctcttttgtttataggctcagttttaaaccttaataaattaataatctcggaaccgataaattctaattaatttataaaggtattaatttattaataaatcttatagagagattttattaattttgtaattttttaaaatttctatgtgagaagtagtttttgtctttataatcaatgtctttcaaaaataaattacaaataaaaaaccaattgttaagttagtaaacaaaaaacactttgttcaatatagtaaaaatattagaaatgaactctactaaaaattttatacaaatttaagaaaaatgaacaatactagagttaaatcccactaatttaattaaatatatatatatatatattaataagtgtaaaattattaatttatgatattgatgagatcatatgtttacgtaagagtttttaaaaacttattattttataatttcattgatttgtgttatttattacattgaaaacgtcaagaatttattaatttgtaaaaatagtaatttatcgaggattagtttataaataatttactgtattagcattcacaaggaataagcatagtacatatatgtcccaatgttaagtaaatcattttttgtataattacttgtcaaaaaaaaaaaaaaaaaaaaaatcatatagaaactaaaatatttggaaatatatatggactcaaaggttgtacaattttgggcctaaccgtattatatataatatacgggctaaatgttacacgtatgaagcccaaaataacctctctttttttttgtcaaacttgatttgtaattgaattttaataaaattaaataattgaattttaataaaaattaaataattgaattttaaatgcatatttttcgataaaaaaaaaatgtctgttgcagaaaatattaaatgatactttcgcagtgacgattattccaaggccgtttgcatgtgcagatgtgcttgatcatataaaatccattcaaattttctaacattagtaaatgaacagttcatcagaataaaagaaacagctcgacatttggtagaatctctaaccacacttttaaagaaaagacacaaacctaatggcttctctctctctctcgaagacaaaacacgacataaatttcttaatcctcattacctatcaccgacaagtaatgaaacatctctataatcttatctgatcaatcatatataaccaaaagcacttgttttactaataaaacaaagcaaaaatcatgtgaaatacaagttcttattgttaatttgttatagtagtaatcaaatcaaataaataaacatttcatcttcttggattcattgcaaaacagtctgtcaagttgaggttgtgcaatgtgcagtaatgaacaaacaaccaaaccaagtttaagaacttaaagattgcatttattgcctccaccttaattggcttttctactttcatttacttcttcttcttcttctcttgatccaaagttttcctctacactacctatagatctgtctttgttcctagaaaaatgataactttcagtgagtttctgtttctctaaaggcaaaacacatcttcactatgcagatttctcttcaaatccatttatcttccttcacttttcttcttcttattttccttcttccagtactctctgagtctcaggtagcttcaagtgaatcacaaactcttcttgaaatccagaagcaactacaatatccacaggttcttcaatcatggactgatacaaccaacttctgtcacattcgtccgtctccttccttgagaatcatctgcctccatggtcacgtaacagagttaaccgtcaccgggaacagaactagtaagctctctggaagttttcataaactcttcactcttcttacacaactatcgagcttaaagactttgtctcttacttctctcggaatttctggttctctttctcctaagatcatcactaagctatcaccgtctcttgagtctctcaatcttagctctaatttcatctctgggaagattccagaagagattgtgtctttgaagaatctgaaaagccttgttttaagagacaatatgttctggggttttgtctctgatgatctcagaggattatcaaatcttcaagagctggatttgggaggtaataaactcggtcctgaagttccttcactcccaagtaagctcaccactgtttcattgaagaacaactcctttagatccaagattccagaacagatcaagaagctgaataaccttcaaagtttagacctttcttccaacgaattcaccgggtcgattccagagtttctgttttcgattccttctcttcaaattctcagtttggatcagaatctgttaagcgggtcacttccaaattcttcttgcacctcctcaaagattataactttagacgtgtctcacaatcttttaactggaaagcttccttcttgctactcttcaaagagtttcagtaatcagacagtgcttttctcattcaactgcttgtctttgattggcactcctaacgcgaagtatcagcgtccgctttctttctgtcaaaaccaagcaagcaaggcaatagctgtggaacctatccccaaggctaaagataaagattctgcaagaatcaaactcgggttagtgattttgataatcatcggtgtgatcatccttgcagcaattttggttctgttggttttgattgccctcaaaagaagaagatcaagatcagaagatgatccttttgaagtgaacaacagcaacaatgagagacatgcctctgataaagtctctgtttgcagcaccacaactgccagctctaagtcattaccagattcaagtaaacaatgacttatcttattaatacttggacacttgaaactgagtctttctctagcaaaaaccattaacaggatctttctgagtgtaggacgtgtaccacagacaatgagatctgcagtgattggtttgccaccgtaccgcgttttctccttggaggaactggaagaagcgactaacgactttgatgcagctagcctgttctgcgaacaggtaaaaacaaaaacttgacttgagactctggcgacgaacctaatagattacttaatatatttggtattcgaacagctgtatagaggttgtctaagagaaggcataccagtgacagtgcgagttatcaagctgaagcagaagagcttgccacaaagcttagctcaacagatggaagttttatcaaagctaaggcatatgcatttggttagcgttcttggacactccattgccagtaaccaagaccacaatcaacacgctggacacaccatcttcattgttcaagaatacatctctagtggatcattgcgggactttctcacaagtaataataacctgaaaaagattagaatatatattcaggtttccatagactcaaatggttattcattatgggaatttttgtgatcagactgtaggaagaaagaggtactgaaatggcctcagagaatggcgatagcaataggagtcgctcgagggatacagttcttgcatatgggagtagcaccaggaatctttgggaacaatttgaagatagagaacatcatgcttgatgaaacactcacagtaaaaatcagtggctatactattcctttaccatccaaggtataaaactttgttttatttcttcttctattaattgaatctaagaaaatttaatggcatttctaggttggagaagagaggcctcaagccaaaaaacctcggaggttgttgttgtttcttaagatatgatcaaatgtgttctcttctatcaaattttgaaacttgttaatgaataatgtgcagtaatgaagatagagagaaagaagatgtgtaccagtttggagtgatactactacaaatcatcacagggaaagtagttgctgcaggatcttcagagatgggaagtttgaagcttcaggtctgttctgtttcagtcagaaccttttcatctttaagaatccgacacggcttacaaatttagaacctcaatgttattatttcctgcagctggagaacggtttgagagatgaaccatcagtattgagcagcttagcagatccatctgttaaaggatcatatgcttatgagtcgttgaggacgacagtagagtttgctatcaactgtctttgcgaagatcagagcaagcgtccttccatagaagacgttgtgtggaatctacagtatacaattcaagtgcagcaaggatggagaccaagcagtgggaatcatgaatcatccatgaaagcaatatatgaatgaaatgatcataaagagaggcaaaaactgtagaaacaataataagtttcaaacaagtcaagatgtagtttcatggactacctgaaatatcttttattagctaacttagtaatctgtgaataaaaagcaaaaggagttgaaaaacacacaaagacatgtaagagagtgtgtccagctttgctcgacaacattgcagactcttctgttgtattcgcgcttgctttcgctgaacattcgtgcatctcttaaaacaaatcagcagtctacaatcttgctaacctgcttgatgaagacatcaaaatcttcaaaaaccttcacaggttctttataacaagaatctctgtgcctggaatactatagaaaatcccaaaagttactgcaaacctctcactatgctcacgtctaacctctccatctcaaccacactccgtgtttcgggcaatctccaatacagaagtctctacctcatccagcattctataaacttcctttgttatgacttgtatcgctagctaaaaacaagtgcttgtgttccacataactataataaccatagctatacccaggttaggtaagatgtcgaaaacagcaagtggctttgccaagttacctcacctagcatacatactactgatcaatgcattttcgctcacaaaacaaattttgttacaataccattggcttttactagcttcttacttcttgaccaatctcttgagcctccaagatagataggcacaagaagacaggatcatgacaaacgctcgatgatcacaaacacatacacaccagcttccttcattcgagtttgatatgtgagctctcgtagacgcacgttccatggcgtcgagaagccaccgcagcgacggtcatggatattggcactttcgatgagcttggcgtgtggggtatttgtttatgtgtctatgaaccatttattggcaaaagggtatcgaccaaacaagatggtccatgtggatgagcctggttataagtttttggctgtgttgtttgaagttgttgtcattgccattgttatgatatgggacacttgaaaaaaacaccaattgactcattgatttctcaggtttgtaaagaaaggatgttgattttgaattgtttatagcaatcctcgtattgtagtgtactttgtagtttgtagcatcaaaaataacaacaacaatagtagaagagatgtttctctttttttttttttcgccagaagagatgtttctctcttattccattttgacaaggtttatcttaacggtacagtataaagatgggcctataattgttgagttgggcctgtagtggccttgtaggtgttgttattggcttcatttgggcccgccactagaacaccaaatggaccaatgggtgatttattttggatatcagtagaccaaaaattatatcaaattataaatttgggtctgatttgtatcagtggactgatatctttgatactcagtatcatgtgacgttgcagcatacggttggtcaatattttcgctcaaatcagagaaaaaaaaaatctttagtaatcttatgttataatatattaatttttgaatttgcaaaaaaaatttttttatacttaaccggtctcaccaatataatcatatttagtaggagtatcataaaaaatctcaaataaaaatcaaatattataaataatactaaaaaattactcatgatactatataagtatcaccccatatcatgctcttagaattgtgaaacttataaaactggtctttttgttaggcaatggtgaggcttttttactttcaggtttaaaaaacatgttgaagcattagagtgttgatgaatataagtttccctagtaaatagtatcttcagtctcagtcgtggaaggtgtagaaatgggaaaatctcatagaagaagtaattatgagtcatcgtaaactagaaagaagacgaaaagatagcattacgatagtattgatgacgttctggtttcgtaattaaagtgttttcatttcccaatacaaatgacttttgatatttcttctctaataaagaaagtcgcttataaatctcaatcatagcgagaagttttcatttcttctaaacttattcaaaaccctagtttattcttacaataatccttctgatttagctatggaagattccggcatgaaatgtgtctttgtaactactaatatggatactcgtctgggccttctcatggacaaggatgatactgtatctacattcaaaggtgactcttcataatctctgtttttttttgtttttgagttttgcatcttttctaacgaaactaatgtttctttttgtttgtttatatacagagaaaatctgcaaagagcatgaacagtgtttccctagttttggaaacatcactatctccgctttgaaggttacaatgttttcttcatacacactgacagttttcttgtttaagaaacaacaactcaaggaaggtttgttttttgttttataggttaactgttgcggtcaactttatcatttagttgattctctgactttgaacacggctttccaaagcaacgaatcgtttctttttgttgatgtgctgagggttgaggagaagggtaaaatgctgactggagaaactcctttgtcaaaccctagtttacttgagagagagaccaatgatctgactattaaggaagctccggtaacccaagctggtgatgataaaactaaaaagaggaaactgaaaagtttggatagtaccaaaagaagtcataagaaacgatctcttggggatcagtcaagtggaaaaggagaggttgagtctttggcaatgtcaccaacaggaaaaggtaacatctgtttttttttctttctctattgtggtctatggagtatatagctgatgttattggagagtattagtcaagttacatttgattgtacgatcagcttttattaagacattataagggtgatgttattcttgaagtaacgttcgaaactgaattagctgagaggcgtgagactgtgagagtgcccttaatctgtttctatgctccatagatcttgaaaagggagaaaaaagtgctgctacgattgaccaagagaatgatcttgcacttgtggatgatgagaacgagagtcatgaagaagatgttcgtgtaggagcaatagtagaaggtaaacattttttttgtgtttactgatttacatatctagatattcgtacattattataccttgattagctccaagtgcttcgaaaaatcttttaactgctgaatttttagacatcaatcaatctgctgatgttgagaacgaagggctcaacaaagatggtgttgatggaaaatatgctgatgaggctactacatctgtgaaggctgctaagaaaggaaggacaaagaaagacaaggcagccccgactaaagaagatactgaagttgcttctagctcaaggaacgttgatcacgatgttgttatcagagagccgcaggagaatgtaagttagaagtcaaagaagaaaaagtcttcgagcattgtggtagaggaggcttaagtatttgtcatctgatgcatcattgttctcgtttcttcctttattttttcctctacgttgctgaactttagtgctttttctagtttaagaaacttgtttcttctttctcgtgaggtttttggtattacctatgaggattttctcaacgtcaatgtatctaatgcttatttgtcatgtgttgaagttgtaaagttgatcccatgaagcatattttaacgaactaacgatgccattggcttttactagcttcttacttcttgaccaatctcctgagcctccaagatagataggctcagcctcgcaacctcctctgatatgtgagctctctcagacgcgagttccatggcgtcgagaagccaccgcagcgacggtcatgggttctccgccgatgatgactagtttggttaaacgtatactgtacttcgatcttatatgaaagtaaggcccatgggcctggcccaaagtatttgcgacgcataagtccaacatataagggagtaagaccgatgggcctggcccagattatttgcatctgccatttagtgcattgtaaaatttagggaatagacttatacgtacaaccaaacagattcgtcttcttctggtgcggcaagaaatcgccggagaaacttccgaccaacgtgtcggagctgataagaaatagtgtcatgtcacaaattcagagaatcttctcgatcgaattgccttcactggttcctctgcaacttccatctcggatgtaagtcgctccactgttatcacaggttgcagagttgtggaaatgaattgtgttgttattcatttcatgtagggagactcatctatggtatgttgttccagatgaagtgaaaagtatatctcttttaaaacactactctcaaattctgtcaccatctgagaatgataaagttcttcagatgcgaggtaataagcttcagaagaatgctttgcttgctcgcacattggttcgcaccaccattgctagatgtatgttattagccattggagtttcctagttaagttttgtttgcagagcattgactgtaatgtttatatttttattttctagatcagacaaacaatgtggtcgatcctaggaccttgatattcaagaagaacatgtatgggaagcctgaggtgagactgggacagttatttgggattacactagactcatcgtctcggcttatatgtgtttaactttcaattacaggtagattggcagagttataagaactgtgatagcccaccattgcattttaacatctcccacacagattcattgatttcctgtggagtgactgtacatgttcctgtaagtcttttgttaaggcaaatacatacagttttgtcaatgttttcttgttttataaatttgaacacttgcagtttactacgattgtaggttggtattgatcttgaagaaatggaaaggaagataaaacatgatgtcttagcattagcagaaagattttactctgctgatgaagtgaagtttttgtcagctataccagacccggaagttcagcgaaaggagtttattaagttatggactcttaaggtagtttctactaacaacagataatactatatttaagattctgtaaatcgtttcttctcgaaagttaaaaactgttgtgatggttctgtttccaggaagcatatgtgaaagcattaggaaaaggcttctctggtgcaccttttaataccttcacaatccagtctaaggctggaacaaatggaggctacaatctttgcaagtttttttttagactttcatcacactctggaattgaatagggtgcttttatcaaatgcgattagttgttgcattgtacactttgtaaaaatttcctttgcagtgtctttttcatttccttttaagaaaaggtttttgcaagtatagtgtataaatagacagtagcgatataattttgagacgcttgaattgttttctttagacatctgaaatgtctgtcgattcacaggagaagacaaagaaatgcaacggagaatggaagtttgccctattggagttggctgattctcattatgctgcaatctgtattgaagatgatcaagctagtggaggtgcagttacagttgacataggtcctatgagggtaattgttcatttagtggtttcttcatcacaactttgtccttcttgcaggagctcctatgagggtaattgttcggaaaaccatcccgtttgttgaagatgaacttatttctgagaacaaaaatctttagtgcagtgtagcctttaagttcaccatcagatttttgtaagcattttgttttcaatacgtacctctgtagtgcatttcgtgcaagcgtaatatcaaagcttataatctgagtaccaagtttgtgactcttggaaaatcaccagtaatcctttcacgagcagaacccatcataaggttgaatataaacttgtttgtgaactgattgcagtaacgaagatggagagaaaggaaatgtgtaccagtttggagtgatactactacagctcatcacaggcaagtagtggctgcaggctcttcagagatgggaagtttgaagcttcaggtctgttctgttttagtcagaaccttttcatctttgtaaatccgacacggcttaaaagtttggaacctctatgttatttcctgcagctggagaacggtttgagagatataccatcagtattgaacagcttagcagatcctctgtgaaaggatcataagctcagtcattgaggacaacagtggaatttgctatcaactctcttggaatctgcagtatacaattcaagtgcagcaaaagatggaggccaagcagtgggaatcatgaaaatcatctatgaagacattgtgttaaacaaatgatcataatgagagacaacaaaaaatgtagaaacagtgacaagtgttaacaaatgaatatgcagtttcagggagaacttgacatatcttctattagctaaatttgtaaactgttttaccaaatataaagcaaaagaagaagatctgcgactgaaatacatatgataattatgaagatgaatgtggttacgaaaatacaaagaaaaaaaacatgaagagcaacaaatcacagagtttgaaaaacacagaaagacataaaagagagtggtagggagagtaaacttctctcagagatgtgatggtcgaaatcagatacaagagaggaggtttaatgttatttgaagacaaatgctacaatgatataattactagtcggcagtccagctttgttcgacaacctcgcggactcttctgttgtactcgcgcttgctttcactgaacattcgtgcagcttccgaatttgcaggagaattcggattaggatcacatagcaatgactgtgataaaaaaaggacggcgattgtttagccactaatgtaatcagattagatcaaagatccgtgtaaaagatcaggggaggaagcagaataacaacaatcatcaacggttttactgagaagcatttcgatatgacatttcttgtatatatacctgaatggaggttagtatagcagcgacatcgtatattggactccattggttttggagaatgtccaagcatatactcccatcagcataaactgcacaacattgaccaagtgtgagctttcgttgatcacatgtactcagagtaagaaactatgatgtgataatctccaacttactgtttggatggaacatccgtgaaacaaaccgcactgttggtggtttatttggataatcttccgaaaactgcagtgacaatttgaaagtacctaacaagaccatacaaaagagacataagaccagatacataaaagattgccaaaattctcaagttaagtgattacaataacaaaactttacctccatcccaaggggtatcatcaggcctgcaaatccacaatcagaagctttaataagtacagtgcagagaaacctatcaagtatcgttttttttttttgttactttagttcaattacccgaatataacagcattccacaacatgatattgttgtcttgtggagcaccactaattcctgcaggtgggtcttgctgcaacctcttgaaatccctcatcaatctcttcctcgctggagtcgacatccttctcttactctatcaaatcccagtaaccaaccattacagtatttcaaaaaccaactatctcagagcttggatatgcaattatctcaaaccatttgaatctgccaagcaagtttataacctaacctaatgatcatcacctaaatagcttataagcacaactaggaagctttgagatcaattctatacaaaactacacaattctctttaacctaggaagctttgagatcaattcacacgaaaatgtccaaaggatgatgataacatctgaaaagaaactaaaatcaatggatctagcaacgaatcatcgtagaacagaaattagagaacaagagagagatctcactgttgtgcgaaaaggtaaaagatcggtggagattcgtcgtcaagcaagcatctctcagccggagaattcaaacaacgacgatgagagaaaaagtctccgatcaaaaagctcgaggatcctcgaattcaccgagcgatgagagaaaagagaaatgatgtagaagttcgtataacgcacgcagtggtgtgatcttctagaagcttcgatctaatcaacacatatctatttatctctctctctgtgtacagtcagagagacttcagatatttttttgttcaggccatgcgagtggcacttaaccgaaattaaaccggttttaaccagatttgtaaaccaaataaaagagtgattttgattttgattttgttcattgtttgttgtcgacgacaatggaggagctttgatgtgttcgttctctcgtttacattttgtatctttctagatgataaacctaacgagacagagataccgagtctcgaatctcgtgaccggtggaacttcgctggatgtgattttgtctcactctcctaacaagttcacattcccgcctcttcttaaatcatgcgcgaagcttggagatgttgtacaaggtcggattctgcatgcccaagtcgtcaaaactgggtttttcgttgatgtgttcacggcaacggctttggtgagtatgtatatgaaggtgaagcaggtgacggatgctcttaaggtgctcgatgaaatgcctgagaggggtattgcgagtgttaatgcagcggtttctgggcttttggagaatgggttttgtagagatgcgtttaggatgtttggggatgctagggtttctgggtctgggatgaattcggttaccgttgctagtgttttgggtggttgtggggatattgaaggagggatgcaattgcattgtttggcgatgaaatcaggttttgagatggaagtttacgttggaacctctcttgtttcaatgtattcgagatgtggagagtgggttttggctgcgagaatgttcgaaaaggttcctcataagagtgttgttacctacaatgcttttatctctggattgatggagaatggagttatgaatttggttcctagtgttttcaatctcatgaggaagttttcaagtgaagaaccaaatgatgttacttttgttaatgcaataactgcttgcgctagtcttttgaatctccagtatggtaggcaacttcatggtcttgtcatgaaaaaagagtttcagtttgagacaatggttggtactgctctcattgatatgtattcgaaatgtcggtgttggaaatcagcttacattgttttcaccgagctgaaagataccaggaacttgatatcttggaactctgttatctctggaatgatgattaatggacagcatgagacagcagttgagttgtttgaaaagttggattccgagggacttaagcctgattcagcgacgtggaattcactgatcagtggcttttcacaattagggaaagtaattgaagctttcaagttctttgagagaatgctatcagtagttatggttcctagtttgaaatgtctcactagccttttatctgcttgttcagatatttggactttgaagaacggcaaagagatccatgggcatgtcattaaagctgcagcggaaagggatatatttgttttaacgtctctcattgacatgtacatgaaatgtgggctctcctcgtgggcacgccggatctttgatcgatttgaaccgaaacccaaggatcccgtgttctggaacgttatgatatctggatatggtaaacatggagagtgtgagtctgcaattgaaatattcgaactattacgagaggagaaagtagaaccgagtttagcaacctttactgctgttctatctgcgtgtagtcactgtggcaatgtcgagaagggttctcaaatatttaggttgatgcaggaagaatatggatataaacctagtacagagcacataggttgtatgattgatcttttgggtcggtctgggagattaagagaggccaaggaggtaatagatcaaatgtcagaaccatcgtcttcggtttactcttccttgctcggttcatgtaggcaacacctagatccagttcttggagaggaagcggcaatgaagctagcagagttagagccagagaatccagctccatttgtgatcttgtccagtatatatgctgcattagaaagatgggaagatgtggaaagtatcaggcaggtaatagatcagaagcaactggtgaaacttccaggtcttagtttgtctggttaagtatatgccgactggtcgaatatgagcaaaggcagggatctctttgggggagtattgacttgctcttgactcgggtctcgtaaagcaggtgattcaccaatttaggtttacatccacagtgtggaagacactgaaggacctaaactaacaaaggtaaacggctcagtgtgcggggtattacactcggtttaatgtctgaatgcgataatccgcacgatgatctctttatctttgtttgtttaggtcccttagtttcttctataccgtgaatccaatcctgtattggatgagctggtttatgacctctgaatcgagagcatgtctatgctccctaaagagatcagagtattagatcctttgtgatcaaatattatatgtaaacactagacaagaggatgagtatctgattcttgtattagcaaaattgtaattgattgcttttgaatgaatacagattgtctaacacaaaatataagttatttcctacacaacaacacattccatttggtctaaactacttcagtctctgctgctgcttttctttccgttctctatctcgaacagctcttggtgactcattgatttgcaacaacaaaaagatggtatggaccgaaaaaccgagtttgcaagattgcctctaatctccatcatctactccattcgtagtctcctccatacttaggcgaagcattgttaaggcggttagagtcttctggtttgatggagttagcaaatgcactccagcctataaggtgcggcaagacgaactgcaattcaagtatacagttagaacaacggggaaagcttctcacaaagagtgtgtgagagagaacttacgttgaaagcagagataagaacagcaaactctgctttagtgattggtatgtatacactctcatctacattcaagagcttgttttgaacaccttcatgaaaaatcaacagttgaaatcagaagagctagacgaaaataaagaagaagagaggaataaagcttttgcttactcaggttaaagaagcggccagaaccatctgggagcggctcaactttcaacactttcctcactttaccttcatcactactactcaacaccaacaccacattgattacgaatcagaactacagagaacaacactatctgtgtaatgaaataaaatcctaaatcatacccttttcccttgaatggatcatggaagaattcacatgattccctcggcccaaggctaactagattaccgatttctgtaaccgacaacgagaagacctgcatcattcgacatcaaaaaatgatttaaccagtcacaatattaagcaaaagactgtttctttcaccaaagcaaatcatgatcattatcacaatccatatactaccaagttaaagatccaaacctacatcttttctacatcaaaacataatcttaccacaatcataatatctttcaccaaaccaattgattttcatcatcacaatctataaataccaagttcatgataaaaagtagacctgcaacatttcaaatcaaacatatctaactaaccacaaacactatagaaagtcaaaaggctgctgctttcaccagatcaagtcatgaattcttctatcacaatctatgaagtagtaagtgaaagataaaaaccaaacctgcttcctactccaatcatattgacgaacaccagctgcaggagcaaattggagcaacaaaaaaccttcctttgtcagcttgaacgcaccagactggatcagaacatgaagaatggagatcaatctaagatcaaacaaacaatacaatagagtttttgatcttcgacaaagacacatacttccaaagccacaaactctggtgctcgtggttctatcgtaagagcagctttccctttgtaaatcgaatgacccacgtaaaatctaggagaagatacttcagctataaaaccaaaacaaacaaacaaacaaaatttcaaactttctgaatttcaaagcttcccatttttcaaagctcaaacaatgagtgaaaaccctaccgttttgcgaagaagacgagtcaccaaacctctgtttctcaaagtaatcactttgtcgagacttcaccgttaatttcaacctcgccgtcggttttaaaggaataatttttccggcgaatccaccggaggtgagaattgagtgagaagagagaaaacgagcatctgaaaacttatggtttatgaaggttttggagaaaaccgccattggaggagaagataacagctgcgacattgtttttcttttcactctcaatgcttcttcgtcttcttcaccgcgggattacgatgacgaaaagggtttaggagagaatactttctgttaattcgttttttacccaatcatatttaacatcttacaaatgtgccccaatataaccaacgtttataagaaagccctccaacttttgcaagacattaacaagagatgaaaataaacattttcgaaacatgaaaataaacattaacgagaaaagaatcgacgttagtaatttcatattcaagagtttgtgcatcattaatttgtctcttctcttgaacatattatccagtagcatatgagtttattgctcttgattctaacttataatgttttaagtcattttctgtacatattttcactatttgataaatcaattaaacaatcaaacaatatataaatatataatgtacgatgatacgcatcaatagaaaaaaatatattgcatactattttttttttagctactccagagtttcaaaaaatcttgcaaaacatataatctaattcaacaaaaatgtatttgttgtatttagttacaactattgacttaaaatggtgtttgcgaaaaaaaaaaaaaaaaaactattgacgttagagtttgatgcatccactcagcaagtaagtcctctcccaagcaattttaatgaggggaaccatgcaattaaaccgttatagatgactcattcccaaggatctgaaattaaaaagaattaaaaaaaaagtgtatattgaaatctacagacacatcaaaactaaactgattgaacttttgtacctcaactgcagaaaaagtaacaattttacatcctctaactagatttaggcttacacgataactattcagtttcgtgagatactctaatggatggattgttgtttttcaacatctaagtcaaaagtttgctaatctcgaaaatagttaaatctgattatatacaaatgtatgacttaacaaatttcttgtgtcgttaaagtattagataacattcagaaactatattaaaatcttaattatgtattttttttaaaaacaaaaacaaagtctctctaagattaaagttcttttataaaactgtaacttccaaaaaaatgtattcgacgtgaaaaaaacttctgtaaacaacagataattactgaataattcgttcttcaagagtcgaagtgtcattaatttgcctcttctctctaacatgtcatcgagtagcatataaatttattgcttttggctataatgttattgctttgtaatcattttctatacatatttcactatttgatctatcaattaaacattcaaacaatagatgtatttatataatctacgatgatatgcatcaacaaatgaaaattattctgcatattttttttttgaacaactccataatttcatttaatcgtgaccaaatcaactactatatttgaaagaaaaactaatcaaccaaattgaatctaaatctagtgtagtcttatatcaacatctaaattctaattaaaatagtaaatatgattcatttgtttatacctaaaatctgataaaatcattaaaaagttaaaaatcaacaacattttaatgtatcttatatattagtgttgacaatgagtagattagtcaatgtatcttatatattagcattgatcctttaaacttttgatgttggttcctagcattatatatattttaatttttatagaaaatttgattgattcaaaaaaaaaaatactcccagattcaaataaattgtttttatgggagatgagttttcgttaattcgtttttacccgacaatattaaaaaccttacaaaattgacccaatatttctagaaagttgactaagatactttaatgcacggtacagatttattcattacgtttagtgcaaggtcaaagagtttataactgagttataaagtaggaaacgacaccgttcaacagaaaccgacattgacctgacagtttcttacgccggcgagcgaactcgacgaagaagacaacttccttttgttgcacctgtgagtctgcgaccatggctatgcaatctggtattgggttatcgaagattttgattctagctggagcaggtatctagggtttctcgagcttgtgattttccccaattttgaagatttaaaagacccttttggctaatttgttgtctttgaatctgaaggttatactagtacgattctggttaagaatgggaagatggcagatattttgggtgagcttcaggtacgattagtaaaagtttctttgttcttctcaattttggattagaagggacatagtaaaaagtttgttcttttgacttcaaattcgaaggctttggttaagcgatttgagaaatctggagatcatgtagatgatgattctgatgccatgactactcaggtatattttgtgcatctgtttgttaaaaaagatcaaatttttggaacaatcatatataaatgtgcgggtattttgtagatgcaacgattagcaatggaggttcggcaattggcttcgtcgcggcagataactgttatgaatggagctcagggaggtttgtctctcggctagtttttgatttggtagttttgatgaacgattgttaatctctaactttctcacttctacattttccagctgattttacaccgtttattgtcccggcagcgacattgggagcattaggctatggctatatgtggttcaaggtatcttatagagttccaataacagttatatcactaaagtcttttgtaggataaattttctctgaagctgatgtttgtttctgtggtagggaatttcattctctgatatcatgtgtgtaacgaagcggaacatggaaaatgcagtgtcgaacttgaccaagcatttggataccgtttcagaagctattttggttggtgcttcttcgaacaattgttgctacttgtatcaggccttatgtataatgtttaagggattgtaattgtattgtgcttttgcgtttgttgttgtttagaatgctaagaagcacctgagccagcggcttcagaaggtggacgataagctagacttgcagaaagatctcttaaagggagtccaggataatgtatgaatatggcattgaatattaataggttttaagagttcttctttcgagggtggtattaacaattttcagacctatggaacaggtgggtttggctcttgaggatcttgctaacattggagatgattttgacgcaatgcatagcatctttggtggtatggtgcgtatactgctgttaaaaatttcctttttattgtttcttcattgtcatctcgagcaaaaacatgtctgactaccagaattaagtgaccaccactaagactttttctcttttccttgcttataactgttaacattaactgaaattcatgaatatagcaaacaaaagatacagaggttctactggtcgttattgcttactgattccatctatatccctatttttcagggtgggaaattagatagcattgagtacaagcaggtacatcttgttattattaatgtattcaaagacacttgaagggatcattgccagctaatcatggagtcaatgaagtaaaagatcaaatttactaatttattttctttggttactgttttttgctgggcagaatattgcgaacatgggtttgatatatctgtgcgactctttgggtggagaaaatcacaagatgccggatatattgatgcaggtatgtaatcttgtgaggagaaacgtttagatggagaattagtacctaacaataatctagatgtctcacctctgaacttcctacatcttgtccatagacttttatgataacttgcttcatgtggtcttgcaggagaagcttcggctttcagggaagtcaaacacatgtatagtacttacaaccgaagaaacttcaagctcagaggtattttggatcaatatatatgatatcaagtacactcgcagatagaatcagatgcagcattgcagtatgattgtattaaaccttcaaaactcatccgatctgtctcttgaaatgtttcagggtttaaaagaaagcgataagatacagctactagatgactgctaattcaaatggtgccaatatatcatcaaggtttgaggtcatattacttctttctttcatgaacagggacaaagccaaatctgtctaaaacgtttgttgtttactcttttgaagcaagaagccacgagtctgatagcattgacgagaatgaccctggatttggatagaaagaaggtataggattaataggagtgattattatgtattggtatttagaatagtgtgtcctttgaggcaagtaagaagattgagaaaaataaaaagaatgtgctttttttttccttcaattttttcgcatccaacaaaaaatgaaacctatattttttctaataatatactgcattatgcacaatttgttacaaacaccatccacaacacatacaattctttttgtctttttttttttgtttgttaccataacacatgaacacacacgcacaagcttttctcagcaggacttgccaggtttgcagccaagcgtaccagcatccttggtaagtcttctgacctttgttcctggctgtggccggattgcaaactttctagggattggattttttggggttgcgctccacgcgttcgcctttcctgattgcacaaagtaagctccattcaagaaataatctttctctgattgccagttccatgatttccattcaggataaggtgtgtactctctctttgtaacctgcattccaaatttctctcaattatgtctctcaagtgtagctgtagtgatttgttgattagagaaagttttcgtagtttttacctgcttggaatcttcaataggaggagcaatgaaacgattgccttgacttataatggtagggttcatgtttccaccaattgcatacatttcccagtgagtgtagtcattgttcacaacatggaccaaaccaaatctgactctaggcattctttgcttcaatctcttaccaaaatggttaaacgcaactgttatctgcattttcttgtcgatcacatccttgtttgtacccccaaatagcatcacctgcattaagagagaccttagacctcaatagtttctgcattcgaagtttgtatccagtgtgtattgtttggaccacagatacttctatgatttatttgtagccttatttacctcgtcgtggtcggtaaaatgggaattggagatagtaattgcagtcgatcccatgatcgcatcaatcatcccatcagaacaatccgtcattgagacatgatcgatccaaacattcgttgctccaaaaatattaatcccatcgccatcactcactgtccgaagcccaaaatgttgctcggagtctataatcaacccaccagctccccttttaatctgtttgatatgaatattatgtattatcacattcctgacgaactgcaacgttaaacctgcacccccagtgatataaattttcgctccccgaccgtcgattgttttatcattcgttatgatcagttcttgttgcagttttatgatcatgcttctcgcaaagatgatccagagtggtcggtcccttgtcacggcgtgccttatagtccctggttttggttttagtagatcgttgtcggatgggtcagtgactacatagatcggtccgtttttgcctccggttgttttccggccaaatccgaggacacaatctgctagttttttcctgtttttgtcccagtttttgtcgcctcgccagcatttatcgatcgcgtttagggattcaaaccttcctccacgtctagttgttttcttaccgcgtccgacctgacggagatccctccttgtttcgtttactatccctgtcgtctccatagctctgagaaagaaaacaagaaaacattagtttcttccggaagaagttaggttttgataacaaatcaaaaaccctaactaggttaaattttagagaacccacaaggcggcatggtagttaaagtggtccgtgacgttctctgggttcgggtcataagattccaaagtttctcgcaatgcgttggtttgacgctgcgtccagtattcatcatattcggcgatgtgggcttgaaccgatggaaccaccacggtgagagacaacgcgacaaagacgaaaacgtagctcccaagattcaccatttgaatcagcagtggtgagagatttttattttatatgtatctttttccggtgatgaatttattagaacccttgaagtttgggtcgtccaaaaagttttctggtcggcccagggttagaaatagataatcggattcatggctttcttaaataacaaggaacttgaaagagagagggaaaatgaaagacattaatggaggatttaacgattaacagagtaattattaggttaccattgatttgtaaatatctctgttacttttcctgtaaaccaattatagtttgtgtggttttttttattgttctttctttgtttgtccttcttttgtggaatatattcagttatttttgtctttaaacctaaatattactcttatttgggttttcttgtttataatttttgattaacttaggattgattacaaaatgaattcagtaacaaatcatttcttactaaaagccaacaaaattcaatcaaaaacttcaaagaccacttgcacttacaaagaaatcataagattacggaatgataatttttgttgaaaatataaacagataaacgtatgattccaccaagtgttgttagctcaattggcgaaattcgagtgacgcttgagacgaaactaatattacatgctgtggtttcagacctaggggattacgggcttcagtccaaaacctcctgatatttaaaaaaaaaaaaaaaaaacgtatgattccgtttaaacaaatatctagtcagtatttcgttttactgttttgagatttttaacttttgaaacataaattaaaattctgattaaaagttgatttataacgagcaattaaagtgtttcattttagtattttataaaaaattctttcgaatccttcaccctaaaatgttatataacgaccaacgaccaaattttttgttcgactaccaaacgaacaaaaaatgtgttgcgcgcaataacttttgatgatcgcaatcgttggtatcagtctttagcaactgcaaacatgaacatagacttcacattttaggtatttcaccattttctatagtagtagtgtagcaatgtactgtgaattttaattttggtcttactcttagatgatagatttgagttggccgatatgaacattggcgacaatttgttattttcgtctgcgaacctgttttaaaaacaaaacagcttaatacagcccaatgggcctccttactcgaatcaataataagcgatgagtgaatgacacatgttagcaccggagagtaacgtacaaatgataaatgccacgtaagccaggttgcatcgatttgataacacaaacaaagccacacgacacaagagaaatagataagtatggacagtcagcttttgtctttttccagcctttgtttacgtggaatctcggtttctaggacccactacactccttaaataagaggtgcataattttatatttaacaaatacaattagcattagattagtccaaatatccggagtgattttttttggtttttagaatatttatttttttattgtaaattataaaaaatgttatatataatttttttatagataatttttttaattttattagatttatgatatacaatgtattctttttttatgttataaatatttttaataaaatttgtttttaataaaattttggtgaacgattataattatattttgttgtaaattttttatacatttatttttattaatctgtaaatttgtaataaattataatatttgaaattcgaattttaaattttttggtataaaattattaataaacttttaatcaattaatagatcaaaaaaatttatgtccaaattaattaattaaaatttttttaacctacactattgtttaatgttatcacaaattataaatttttaaattaattattttgtttggtcggcaaattaagatattattatcaaaaacatttttttttttttcgcaacacattagttactaaatgaactattaagttcacttatcttatccaatttgtgtctaccctacataaaccttgtacttatccctaaatcactttagataaattgttgaaaatttaatttataaattttgtatttaccaaattaggaaaacaaatatctgaaaatatttatttttaatatcttaacaactcgaagaactgagaaacgcgacaaaaccaatcgtcctcttccgatagccacaaaacaaaaatcagacaagaagaaagaagaacgtttcttctaacagatagagattacaatcaaattgactcttaatttctcaattccgtatctctcatttcatcttcttcttcttctcctttacttaaggatctctggtttctctttctctcctctgtcttatcttctccaaagttacgctttttttcaatgaaaacattttcttgattcctgatttcaaatttcacaatctggatttcgtgtttcgaattcactttgaagaaaaagtttctcaatttcgcctgaaaacccacatgggattggaactaaacactagactgacaagaagaagaagagtaatcatcatcgagtgtttattacgattatgtccttaacgaaatcttcagaatcagttttcactgaagaagaagaagaagattcctttagcggtcgatacacgttatggatcaaagaagcattagaggagcttccacacaatttcacaatcaccgacccgtttatttcgggtcacccgattgttttcgcgagcttagggtttttgaaaatgactggctattcacgagaagaagtgatcggaagaaacggtaaagtttttcaaggacctaagactaatcgaagatcgatcatggagattcgtgaagcgattcgtgaagagagatcagtgcaagtgagcttgttgaattatcgtaaatctgggtctccgttttggatgttgtttcatatgtgtcctgtttttgggaaagatgatggtaaagtcaccaattttgtggcggttcaggtcccgatttcgggacgagaacatcatcggaagaagttgagaaatgtcggagatttgtcgtcggatacttctccgacatttggttcttgtcgaagagaggtttgttttggtaatttcgtgtgtcaggatcgagctttaccagtggaatgtgatgatgatgaacaaggtttggtttttaaagttatgcgttttacttgtttgatgaaattcctcagagagcgtttgaatcagtcagaatcttatcctatagcttaatgaacgttctaagtattgatttaagcattgttgtattgcaggattagaggattgggaacagtgtgaagcgagtgagtccgagaagctgaaagctacggaagctattaacaatgtgttatctatcttagtgcattacagcgagttgagtggtagattagtctgcggaaagcggtactgcttgcgaggagtagattgtctaagctcgtcgttagttatttctctcggtagaatcaaacaaagtttcgtattgtgagtacattatttttttattgtgttatggagttacagtctgctacaatagattttgatattgacattgttctcgtaactttgcagaaccaatccatgcttaccagacatgcctatcatttatgcgagtgatgcctttttgacactgaccggtaagtgtgtctaggtttgaagaaataaagttaccgttattagattttggtcacagttcttatttatatcaatgtttgtaggttacaagagacaggaagtgttgggacaaaactgtagatttctgagtggggttgatactgattcctcagtactatacgaggtagagattgcgttttaacttgttaattagtatatggcatgattgataattgtgaatgttttatttggttcagatgaaggaatgcatcttaaagggacaatcatgcacagtgcaaatactaaattacaggttgaagatttacttcttcaaaacatttttgcgatcgaatcttgtttctttgatttgttttgggctgatcatatatgttttttatcagtaacagaaaagataagagctcattttggaatcttcttcacatctcaccagttcgtaatgcttcaggcaaggtacatatcccttcatgactacatacttcctgttaccaaatccttttgtctttcattttttggccttgatacaaaacccgaatatgacatgtagaactgaaagtaattagtacagttactgatttctgctttttttagacagcatattttgtgggtgttcaagtagaagcaagttgtagaaatactgaaattaaagagctgagaccagagacgagacaactgagtgttgtcggtgcggttagagttgcggttagaagctcattgatggtgacatgctaatatacgccagaaagaaaatgcgtcgacttagagaagagtctaaagtgaattggacatacatctttactatatgtataatcatttgacatactacattaatataagtctttattttaccgagtatgtgcactcaagagaacgtgaatcgagttagaaataggtcatttattgaatgcggataagtatcaagaggtaagaactagttagtttcatcaagttaatatgattagatgagtatattattaagtgttccgaatgtcgaaaatccaaatgatctcggtttcactttacagattccgtatttttcaccttcaggagaatgcaacatcgtttatagaatgtaagaaacaaggttggtatcggcaaacaagaaaaaaatattacaatcgaaaatgttctgctcgtgattcgacaaacagaagacatctccaatctgtattccaaaaacacgaagatttataggtggaaaatgcaacatagaaaagtagaagacatttccaatctgtattccaaaactgttggatacggacaccggatattgcacttatggcaaattgggcgagaagcagaattgttgcgttgaaaaagaatctcaccgccacacaatgggaaagttagacccggcttcaaatatggatctgggccaagtaagcaattaatatgaagtgtggtacaacactcgttgcacttatagaaccctttttctcctccaacgactaagcttccttcgcataattcacaccaatctgagccacttgcctcgtctccacgacaaaacgtgaggtaatgctcatcatgcttgtaccttaccgtgtatggtagggtagcacacttaaaacatatgataaaatcacattcaatgcaatttactaccttttgaactcctgttgacttgcaaatgtggcatactgtcgtttctttgggtctaaagccagaaataaagggtgtggatggacttgataattaaatggctcagaagccgaagcacacactgcatctagctcgtagtcacaaccattgatggtacacacatatccaaaaccactactcttacgcatacaagcagcacattcgaattcatggttttcatggacaaccttttgttcaattggatgtggatgtaatggatgaaccttcttccggggggcatccgcacatttttcatgtagaataaagtcacatttcacacagacataaaagttttcctcgttgattggaaggacacaagcttgacaaaactcgttttctttgtaaactccattggtttcaaatttcatatgacaaccatgagaaaagtgaagtatgattccatcagctatcctgtagaacggaagctcaacatctttgtcttctggtactccttcgagttcaatgccatcccatatatccttacgcaatgcacatcttgtgtgaacagcgtagtccttacacacattgcaactgtatgccccataatcactgtcaatctctcggcgacaaattccacaacaccattttcctgatggaagagaagaagtgaaagacacaccgtggaaatgacgagagattcttatagtttgtgggttatggatacagtctatatgggctacaaaatcgcatatagaacgacagacgtaagtgagatgaagtttatctaccaaaccgcaaacattgcatgttaaggaagcttgtctaggaaaaagggtgagggtatggtcatgcttttttggttggtctatgagaaaagggatttttgcctgagcacaaaggacatgcatataaatgtcgcaaagagcacaataataaagcaaaacttctgctttctttgtgctcaagatgcaatgctcaaatgtttttacattataaagttggagagaatgtttgacgtgggaaggataattgatctctagtggagactcaacacattctttgtggtacctttgatcacactcgacacagaaataatagcatgtgccgacctttcgggtattgcaaatactgcaatcgttttttggatcagcttctttattgttacaccaaaagagagggagtatgtcatgaccatacatcatattgtcaccaaggagatgggaaatccttagcttgccatcaacatcaggcgttgggcccccatcatctaatagtttagcttcgatcgttattgttagtttgaatcgtaatgaagggcatataaatagaggtggaggagggaggttgtcgccggaatcaatggcaactttagtcatgttttggattggtaatgggttttgaatgaggtgtttttcatcggaggaatttgggctgtgtatttgtggctttataacgttttggtatatgagacatggtttcccatcgatttctcctttttgaaattctccgaccacgtccatgtctgcttagatcggagactatttttaagaggtttttgggatattgctatcgttcttgcctttacatatctatagacacatacatactgaaacgtgatgtcctcccatttgcaatttgtttaatatttctttcataatgatataatttagtcgtgagtttttgatgagtgaacatgtcatataattcaagtggcacataaactatgggctatatgctattttcacagtattattacaataacatgatgatatatattaatgcatcttatgtacgataacataatgagatatattaatgcatcttctgtaagaaagtcattgtttaaacttatacagctaaagctggttgataaaaacaacaaatacagctaagctgaaactttctattttaaaaaggcaaaatacagctataatattaatttagtctgttttataaagtctttattattgtattatttatctcaacgatttttttgtatatctactaataattgagaaatttaaattttcatgccattggttttaagaccattttcctattttatctaaaaggtataaaagctttattgtttttggagtattaatttagcagaatattttcggattttaacaaaaaccggaaaattaacttaatctttctaatccgtaaatgtgatttttttttcttaaatatcaggaagttctaaaccgaaatctataattctctcaaggccgaaaccacaacatgtaataataatttcgtcccaagtgtcactcgaaccggcgacttctaaacttcacgtaggatctttaccaattgagctaatgacacttggtaaagtattaaatttttaattattatatttagaagattttgttaagatttaaatttataccctaaaccctaaacactaaactataaaccatatcatttaaaactatactctaaaaccaaaatagttaatccaaaccttaatgttttgtgtctatgatactctgataaatccaaaagttttgatagtagttttgatatattaaattaatagtgaagtcgaagtagaagctgcaatctaggtgatgaagtgtatgattggccgataatcaaggtgtagcatttttttacgaactgttcaaatctggtgaatatggtgtcttctccaaaagaattgtcggcgttctcagcttatttggaaaactacagagcgacaagaaagaattaactaatttttctttatctttaatttcttgtaatgtaaatataaaagcgcataatttggcgcgaaaagttcgcactgaaacgcttcatatcacttatataaacaacatttctcaaatttgcctcgttttgtgctctaattaaaatcgcgatgacaaaaaaaactaatatatagtgatatttttgataataaccttataaatgtgatattttaagaaaaacaatttaatacttcaaaatattaataaacaatggaaagtacacaggttggaatattttgacttctaacataatattgaaggcacatggaccattgaagttgaattgggaatccaaattttttgttggaatatttaaaaataataaaaattgttggaagataaaataaagagaaaaccaaaaatacatattgaaaacagtgatcaggtaatttctgcaaatagtaaatctgcaaaaaaaagaagtaaatccaaatctgagatgaataagatagagagaggctatctaaccttgaaattgagtatctcctacaaacattaacatcacgtgattgacgacaatctaattagcagagggatataattagactgaattttgaaaaatctcaaacattttatttggctgtaacaagagaggagtgtacttagagtttttttcttttttttgtcatccgaaaattaattaggactcaaaaaagacaattctgaagaatgttgtttacaaatgtaatatgaagcggttggatacgaacttttcgtgacaaaaaatccgctttaacattagcactacgagagattaaagataaaaaaaaaaagcttgtgaactcatttttatcgttctgtaactcttccaaatatgatgagaaagtcggccattcggttggggaagaatgtacttgagtttccttcttattatatagaagtagagaattttgaacgttgttacttgttggtattagccgttacgtttcttttaatcacgtgataaaaaattaacttaaattcactcatgaccgttgttgatttttttacaacgttcggatttgtttactgtggttgattaacttgatttgacttattgttatccgaaaatgaaaacagaaatgggctctaaatgggctttaacactaggaagtaacgtggttagaggatttgttagttgactaaccgtttctcggcttttttggttcacccctctttttctgtgtgtttgtttgctgtgcaagttagggctcggggacgtgtgtgattaattgaggactgtaagaatttcacaatcacagacactttagatccagcattataagagattcctcacaatttcacaatcacaagttatgtcctaatttcgggacgagtacatcattggaggttgagaattgagttggataaaactgaattggtgattggttcttgtcgaagagaggtttgttttggtaatttcgtgcatcaggattgatttttgccggtggaatatgatgatgaacaaggttggggttttaaagttatgcgtattacttgtttgtgaaattcgtcttagagctttgaatcagttagaaaagtttattctatagcttaatctttgcttaattgcttcatggacgttctaacaatagaattaagggttctaaatcattgcagtggactatctcttgcctccaaaactagggttctaaagcattgttgtattgtaggattagaggattgggaacactatgaagcaagtgagtccgagaagctgaaagctgcgaaagcaattaacaatgtgttatatattttaacgtgatataggaaactaggcattgatatatggttagatacgtggcagtatatgagtggagactgtagctgtgagaagtggcaagagaagattggtcgatggaagtcgtaagaggaagaatcgagacgcatagatatatagctaaagaggatcatttgtagaaaagataagaagatttggatttgttgtttattgtttccttttcgattctctctgagaattgttcctcatcgttcgccggagtttcatgttgaactcttgtagatgagaaattgatatcgtgttttatgaacgttgtatcaatctatcttttacattaatcgaaatactctatttcgttactctgtttctcgttatcactggtatcagagccatttgtgtcctcggaagcgatggcggagatcaaagttgctcgcacgataccggtgataacgggaaacatagttgagtggtagattagtctgcggaaagcgatactgcttgcgaggggtagattgtctaagcttgtcgttagttatttctctcggtagaatcaaacaaatttcgtattgtgagttcaatgttcttggttttaatatggagttacaagtctgatgatggagtatatttatcgatttttatgttgacattgttctagtaactttgtaaaaccaatccatgcttaacattcctattttctaggcgagtgatgcctttttgacactaacatgtgagtgtgtttgggtttagaaattgtgggtgtaaccacccgccccgtgggacccagctggcgctgcagcacatcaaccctaacctcttttcagtgggcccttctagcccaccaggtaggttattggtgcgcttggcgttcctcgaacccaagacctcaccctttaacaaccttcccacaggacaaactgttaccaattaatctaaagggtgaggtcttgggttcgaggaataccaaacgcacaggctcacatgaaagaggttagggttgatgtgctgtagcgctagctgggtcccacgggacgagttgttacagtgagactttggaaatagaagcaacctttatttgattttggtcactgttcttatttatatcaatgtttgtaggttacaaaagacaggaagtgttcggacaaaactgtagatttctgagtggagttgatactgattcctcagtactatacgaggtactgattgtggttaacttgttagttagtgtcgagtgaaagatctaatttgattaatgtaaaaaaatctcgaagttacattgtctctatatgatctcggttttttactttacaaattctatatcttttacatatagaagtatttcacgatctagaaaaccctttaacaaaaaaaaaagaatttcatgatctcttttttttttctcgtagaaactagatgctttaaatatgtgataaatgtttaaatgattaatcaactgcacatgaacaatattgacaaacaaaaaccaaaaaaaaagaaaacaaaacaaacagaaaaccaaattaaaatacatattgaaaaaattttatagatgaaaaaggataacacaatggcttttctacattatgatattatggatgaaaaagggtacatagaaaatagggataatacattttctttctcatttccacatatgttggatacggacaacggattttgcatttagcgcacattggccgagaaggagacttgttgcgttgcaagaaaactcgaacctgacctccctcctttgggggagtttcaccagacttcatatatggttccgggccaagtaagcaattaatatgaagtgtggtacaacactcgttgcatttatagaagccttcctttcctccaattgctaatttgccttcgcataactcacaccagtctgcgccacttgcctcatctccacgacaaaatgtgaggtaatgttcatcatgcttataccttaccatgtatggtaaggtagcacacttaaaacatataataaaatcgcattggaattcaatgtaattcaataccttttgaatttatgttgacctgcaaatgtggcagattggctcttctttggggtctaaagacagaaataaggggtggtgatggccttgataatcaaacggctcagaaatagaggcacacactacatctagattgtagccacaatcttccatgagacactcatatccaaaactattactcatgcgattacacgcctgacatgagaagccgccttctacgtgagtaaacttttgtataagtggatggggatgtaatggatggaccttcttacggggagcctctacacatctttcatgtaggatgaagtcacattctacacattcataaaaattcttctcgtagattggaagggcacatgcttgacaaaacttttcttggtcgtaaacttcacttgtcttaaattccagttgacaaccatgagaaaagtgaagtattgttccaccagctatccctttgaacggaggctcaacatcttcatcttcttgcactccctcgagttcaatgccatcccatatatctgtgcgcaatgcacatcttgtgtgaacagcgtagccactacacacacaacaagtgtatgcaccataatcatggtcaacctcacgacgacaaactccacaagaccatttttctaatggaagagaagaagtaaaagagacacgatggtggtgacgagatattcttatggtttgtgggacatggatgcaatcactatgggctacgaaatcgcatatagaacgacaaacgtaggtgagatggagtttattgaccaaagcacaaacattgcaggttaaggaagcttgtctagggaaaagagagagggtatgatcatgcctttttggttggtctataaaaaagggtattgccgcctgagcacaaaccgcatgcatataaatgtcacacagagcacaataataaatgataagatctgctctgtttttgcagatgatgcactgatgaactcctcgcagagatgaaaagcaaagttggagagtatgtttggcgtgggtaggataactgatctcaagtggagactcgatacattctttatggtacgttacatcacactcgacacagtaataatagtttgtgcctgccttttgcactctgcaaatattgcaatccatctttggatcagcttctttgttgttgcaccaaaaaagagggagtacgacatgatcatccgatatattgtcaccatggccttggagaggggaagtctcgagcttgaaaaatttatcacgtaaggctttcccgtcttcatcccctaatgcaatattctgaatcctcgctgatttttgcaatcgtaaattaaggcagatgaaaataggtgaaatagggaggttgtctccgtcaccgatggttacttcatcggaggagtttgttttgttttggagtgataatggtttttggatggtggttttttcagcggaggagtttgaggtgtgtgtttgtgttgatggtttcattacgttgtggtacagaagatatggtttcccatcgatttctcccttatgaaattctccgaacaagtccatggctgctcaatcggagattatttgttagaggatattgggatatttttatcctgaagacgtttatatataaatgtgctttgtccaagctttccaaagacttaaacaactcccatttgcgatcagtttaatacttatttcatactgatatgatctagtcgtaattgtttattgagtaatacagtttcagtggtcgtatttctcataaataaactttgggttataaaactatattcacaagattattggttacgatatcgtaaggaaataaattaatccatcttcacttagaaagttattgttttagttataattttatacagctaagctgaagtaaaaaaattagatacagctaagataaggctggttcatagtatatactcccctgtttctaattaagtgtagtttaaaggttttttattttttcaatatacgtgttgttttcacttttctatgtaaacattaaatatatttaatagtttttaaccaattatattttacattatatttttttattggttggattagttgtaattaatgatgtttttataggaaaaagataaattaaatgaaatttatatgttttattaatttgtgtacaaaaaccttaaactattgagaaacagagggagtattaattaactttgtttccaaaagtttttatgtattaattattttctcaacggtctttttgtattatatgagatcatatcaaccgtattaataggaaaatcctctagcatgtgttaaatcgtgggagagttgttgacacgatttaatatttctgaatatcaataaacaatggaaagtagtgctatacggacatgagtggatgattaagttgacctcttctcttgtcaatttacggaccttgattttgaatggtgagttataagacacgaatcaacagttttttttgtctttgcgtcacaagctactattgattacttattcgttattgtttcactttttgtagacaatgaatcttctccatttgcaagctcgatctactgaaagacttgaacagtctcggtatgttctttaacacccaatgtcattgtacataaatgtttattgaattcatgcagttctttctaggaacccaatcagtgaaatgggtgactcactttcaaagttgaaaaaccattggagatggtcttattgttcgttgatgagatcgtcagatcaattatattatatatggcacatggaccattaaatttgaattgtaaaatataaaattttattagtagatattcatatgcctagttgatccagttgactcttcctgtttcataatactagtatccaccctcttctcaaacgggattgttaaaatcttatacattgcattatatgtagcctttacactaacgttttacttgatttttcttttggtttggttatcgatcgatgatcctgatacaaaaaattacaactataaaagtttattttctttttggttcggtttcaataattattttggtttggttatgatcacctcaattggaatggacatctcaacatgtgcattgtgagtgagaatttgtcttgaaaaataaaagaccttgcaaccaaaaccgtttgcataaaaaatgggtgccttttattgtttgtgaattgtttttcatctgtttttttttcttcattttttgttttctatctttggtctaaaacagtatattatatgttcaaaatttttttttagcaaaaaatctcaaggaatgtggcttttttgggtggatgaatgagaagaaattagcaaacaaagtttcgtattgtgtgttttgggttattttgttcgttttactatggaattacagtctgctactatagattatccccatgacattgtttctttaactattcagaaccaatccatgcttacccgacatgcctatcatttacgcgagtgatgccttttttgttataattctcacctctttcactctttaaggtttgtcatatctctctctgtctttcacactctgttactgtttcattgtcgtagagaacaaaaacaagaaccaagtcaccaaaaaaagtatacaaataaagtcaccaaatactgaattaaataaaagtctgctacaaaccaagtcaccaaataaatgaaaaaacagagctcaaaaacatagagccaaaatcaaagacaatggaaaaaaggacaaaaaaaaaaacaaaattaaactttaagaaaaaaaaaaaaaggataactcaaatagtaatacaaccagtaggggaacatagaaaacgatatgagcttaccgattcccagaaaaacattactggatacggacgacgcatattgcaggtgccgcaaattggacgaggagaattgttgcgtataactagaaattcgttacgacccaacgtgaaagtttgaccgggcttcaaaaatggattagggccaagtaagcaattaatatgaagcgtagtacaacaatcatcgcacttatagaaccctttttctcctccagttgacaattttccctcgcataactcacaccaatctgagtcacttgcctcctctccatgacataatgtgaggtaatgatcatcatgcttatatcttatcacatatggtaaggtagcgcattcaaaacatataataaagtcaccctcaatgcagttgagtacctggttttctttcgttgacttgcaaatgtggcacattggctttacgtttgggcgtaacgctaggaataatgggtgttgatggccttgatagttgaacggctcagaagccgatgcacatactacatctagtatgtaatcacaatcctcgaacgtacactcatatccgaaaccattacataagcgatcacatgcatcacataagaataaatcattttcatggacaaccttttgttgaagtgcatggggatgtaatggatgaaacttcttttgcggagcttctgcacatgtttcgtgtagaatgaagtcacattccacacatatataaaagttttcctcgttgattggaagagcacatgcctgacaaaacttgtttccgccgacgtgaactccactggtctccaattccatttgacagccatgagaaaaatggagtattattccatctgatatccttttgaacggcggctcaacttcttcatcttcttgtactccctcaagttcttttccatcccatatatcattacgcaatgcacatcttgtgtgaacagtgtagccattacacgcattgcaagtgtatgcaccatacttcctgtcaacttcttgacggcaaactccacaagaccattttccttttagaagagaagaagtgaaagagatacagtggtggtggcgagatattcttatggtttgtgggatatatatacaatcagcatgggtgacaaaatcgcatataggacaaacgtaggtgaaatgaagttcatcaagtacaccacaaatattgcaggttaaggaagctt

SEQ ID NO: 157 - DNA, 104016 bp, Arabidopsis thaliana
aagcttcttatactaaggatctcgttttgggtaacaggtctttttgtaggtatggtctccaccattatttcttgcaacctcttcctctacttttaggaagttgatacaagcctttaaactaacagactccacctctctcttttctttgtatgtaaattttttttagcgtcacctcatacggttagctaacgactttaaattctcggcttcctagtactactaggcttggtctatgatcctaaggttccatcctaacttttatggttctttcctaactcttttgaaatggtcttcccgttttctagactttctaattcctttgggcaaggctcctaggatttgatacttggttaagtacgaaacgaaacacacacacacaaacgcattaataacttgaaagtaaattaagcaatcacacaaaagaacattagcataaacataataaaacatagcataagttaacaaccataagggaaaaaggtggttttggctatcgtacacacacacttattcaagcctacagacatcatcaaaacgatatcacaatgtaaccgaagattactattggctctcctatagccatcgctatacatcaaaaaatgaggttagtttcctaatatttactaaggttaggactcctaagggaatcacaataaccttaaactacacttggatcaggtacaaccaagaaaaagatcatcatcggtgtcgggaatcgctggggatgatggaccagctgcgtgagacgggggagtacggattggtgcaagaatctgagcatcatctctcaacagcatacatgtagcagcgtagtgtccgtactcacaacagtagagacagataatggtcatgggcatgtactctgtatagaactcacaatcctgcgggtaatgtccatcttcgccatatataaagcagtatggtatctgaataccttacctggtgccgtcaccaactatcgaaatagtgttagccctcctgtcaaccgcaaaatggagtatgggggacgtgccctaccataacagtgcaaaagggctatcaggagaacgaaggacagcctccgggatgtatggagaaatcagtgaatcctcatattcctccgggtctgactcataggatatcggtgaatacgaggtaagagtaaaggatggcatggtaggactgcccgaggaatcactcacataatcatagaccatcacgatctcatgttccttcagggccagcttctgctccaccgtcctcactgccatgatcacacaatcatcctgactattgatcattatcccatcccctatctgtacatcctcccggataatccgctcaggcataacggctatccctacaaggccatcatcagtaaccgtagcgctcgatcctatctttgatacaactcgggaacactcagccacatctcttcacacacacctacccctaactctctcacggaggtcatatcatctggacggcagatccaaggaccgtccctcctcttccacagactccgtaccacgagatctcttcagcggcatactataatacaaacaaaaaggttaagatacaataatacaaacaaaagggtaagccttttgtttgtattattgtgttagtattatggtgttacccatttgtttgtattattgtatcttaacctttttgtttgtattataatatgccgctgaagagatctcgtggtagggagtctgtggaggaggagggacggtccttggatctgccgtccagatgatatgacctccgtgagagagttaggggtaggtgtatgaggagagatgtggctgagtgttctcgagttgtatcaaagataggatcgagcgctacggttactgatgttggccttgtagggatagccattatgccggagaggattattcgggaggatgtaaagataggggatgggatgatgatcgattcggatagtcaggatgattgtgtgaccaaggcagtgagaacggtggagcagaagctgactacggaggaacatgagattgtgatggtctatgattatgtgagtggttcctcaggcagttctagcacgccatcctttactcttactccgtattcaccgatatcctatgagtcagatcaggaggattatgaggatccaccgatttctccatacatttcggaggctgtcgttcattctcccgatagcacttttgcactgttatgggagggcacgtcccccatactccattttgcggctgacatgagggctgacgctattccgtcagttggtgacggcaccacgtcaggtatacatataccatactgctttatatatggcgaagatggacgttacccgcaggattgtcggttctagacagagtacatgtccatgaccgttgtctgtctctattgttgtgagtacggacactatgctgctacatgtatgttgttgagagattatgctcagattcctgcaccaacccatagtcccccgtctcacgcaattagtccatcatccccaccgattcccgctaccaatgatgatcttttcttggatgtacctgttccaggtgtagtttagggttaccgtgattcccttaggagtcctaactttagtaaatattaggaaactaaccccttttttgatgtatagcggcggctacaggagagccaatagtaaccttcgttacaatgtgatatctttttgatgatgtctgtaggcttgaataagtgggtgtgtacgatagtcaaaaccacctcttttccacttatggttgttaacttttgttatgttatattatgtttatacaaatgttgttttgtgtgattgcttgatttactttcaagttattaatgcgtttatatgtgtttgtttcgtttcgtacttaaccaagtatcaaatccttgaagccttgcccaaagaagttagaaagtctagaaaacgggaagaccatttcaaaagagttaggaaagaaccataaaagttaggatggaaccttaggattcgtagaccaaacctagtagtattaggaagccgagaagttaaagtcgttagctaaccgtatgaggtgacgctaaaaaaaagttttcacaaacaaagaaaagagagagatggagtctgttagtttaaaggcttgtatcaacttcctgaaagtagaggaagaggttgcaagaaataatggtggagaccatacctacaaaaagacctgttacccaaaacgagatccttagtataagaagcttcatgaagccaacgaagaaatcaatttttcttggaggctagttactcccttagtccttagaattcgaggacgaattattttaaggggggaagaatgtaatgcccctgaccttgactatgacccggacggccggacgtgcattttgtcggataaaatgcaagatcaagccaaggcaaggcaagatcagtccagccaattagtgtggtaagtcatgagtaaggagcattagataggatcaagtccacaggtaaaggaatgactctccatcagttgggccaagcttagctacgatgcgactgtcggtaaacccctaaaccattaggttagtcttaagaactagtgtagcttaaggaaaccttagttttggtctaggaaaccttaaaaggtcggggaaaacttagaaggtcgagggaaagttaatttgggacagtccgatatgagaatgggtcgtgtatgatcgagagatttatcggacaatgcagataagtgacgataactggcctgctcggttaattctggcatgtaatgtattatagtccttagaaacccttgacttgtgtcacgtaccctcttgagatattagtgacggagaatgccgtctcaatgttcttgcgatccggtgacagatcgtaggatcctccgaaatgagagaatggatggcaaggattgaatcgcggctcaagcttatccgttagggccgatgcttatccacattccgatcatctttatccttttaaggtcgtttttatccacttttggatgatgtttatccgaaaaaatagaaagaaccaatcggtggccgatttgtgtcccggagcacccgtgggacgacacttgccgcgatttgattcggccgggccacctcatgctttccctagccgacctaacgcccatatatataccccctctgctcatttgttccttgggccaaaaaaaactcgttagaaaagcttagttcgcgggtgaaaccttcagaagcctaaaccgctagggaaatccaagtgagtctcaagtcacgtgaagtagcacgtgaataggatattttcttcatttatttccctaatctagcttaggaggttaattataattacttagcctaattgtttgcttaatcctagattaagatagttaattagatttagtaattgttaattatgattagtaatggctaattaggattagtatttactaagcatgattagtgttagttaaactatgattagcgggactaatcgtgattattagtatttaagtacgattagttgtttgattagtagaatttatcatgtaggatcgaatgcatgatatttcatgagtttattgtcatgttagttagtcaactagcattagccgaatcttgttatcccatatatatgatgtgcgtcgcgtgtaactccttccgttatggcatacaaaggctccagactggttcgctaccgaccgggcgctacatgacgatgtagtataaggaatagcaattttctttagactttgtgtctaggagtgtgtaggccattgcctcgggatagcatggtttcgtagaaggccttacctaagttatcggaagcatgcttgcattagttttccgttgcatattaggaattcgagtctgcatgtattatgcattgtgcatattaggaattcgagtctgcatgtattatgcattgtgcataatgttttacttgtattgtatgttgcgtgttatctttgattatgtgttgcttgtattactcgtatctgtttatgttaagtcgtagtattattacgtgttgattgctgcttaggggtaagggtagtaggttaactctgtctagatccgaggttcactaagtaatgctagattacttataacgctacttattttgcagaaaatcttagttggccagccttgtaaagggcgcaaatgacttaggacgaaccaatgtaggttttatggctttttgcaaatacttactaagtatattatgtatggttttcaaagaggatccgaaaactatatgcgatttggtacccattttccgtacgatatatatgtaataagactcgaatttctaaaagttaaatggttagaccaactgatattagtcttgtccgacttacacaattcgcattcgcggtacgggttgaaaaaacttaggccacagacgggaggctagacacttgcggtggtacgactcaggcaaacgaatttgtttcggaaacctgggtttggccgactgtggacgtctatcgtgacgctccaatttcgtctatctttatataacgggatagagatgttacaaggtggtatgacaaaactttcatttcgaacaaataaatatgtttttttcttctaagagtaacattggattttttttatttttttttgagattcagtgtatgaatctgtaaacattttatagttcggatttatttgttaccaataaattaatttgggttttgttccggaaaaaaaaaagttgaggttttttctatatctacatatacatttttgcagccactttgtaaaataaatcctggagttgggacttatttacagtggctgccactggcatttaattaattgtattaatttttggtaagatgttctctgaccagctccattcgttcgaaactttcaaagatttgggccatttgattttaatacgtgttgtgattttcatatcactcttttgggccaaacggtacaccgctattgggcttcaaaataaaacttcccaacgactaaattatttgcggctacgaacacatattttaaacgaatcaaccctattaaatactaacgtgtatagcacatttgtcgaatcccttaaaatgtgcaaaatattccttagctattcactcaaacaaaaaaagttatatgtagatcccttaaaatgagcaaacacacaacaaaaacatttctaatctattcactaaatcttaattttccaaaatttgaactagagtttctgaaattatttaaaacaaaatatgcaaaaaaaaatcggtggtatcgtaaaatcccttaaaatgagcctagattttggcaactatttaaaacaaaaatttgtttgacaaatcaaaataaaattgcaatctggtaaaatatttattttaattatatatttaaattagcgatgtgccgcaggttttttttacgggacagttttggcgggacgggtttggcaggacgttacttaataacaattgtaaactataaaataaaaatattttatagatagatattatttacaaacttttatatatactaattttaaataaaaaaaaattgtcttctcggtgtaccgtgtgttaaaatctagtaaattttacataaataaagttattttttgggaattttccccaaaattaaacttccatttctgtttttttcattattatggttggcaacctcattcttttttctttatatcattttcagtatatatattttttgaaatatatttttataactatattataataaatataataagaggtccgtttgaatcttccaaactacaaaaccgactctggttctctagagagaccgcaccggatacttttcagaaaacataagaaaaacaaaaaaagttttgatacgagttttattgcatacttcaatagtttcttaagaacataacaagttatcaaactattttcattgctagatgttcgatcaaaccgcggtgactgcgattttcatatcgctttcgcaatggtttggaaaattgcagatgaaaaagttttgtcctttagacaaagttatacgatctttgcctgaagtgtaaggttttgcccctgtcggtgttttgcagttgttgtaacttccgctatctaccttcactacgttgtgcatcctcggattatagttaaacactgcaccaaagttttggaaaatataaaattttaagttaatcatataattttttttttttggtctaacgttaaattagttaatcatataattgattactcgaccactcttaattgattccatatattgacactcagattataaagtagctggaactgtttaggaatttcataaatctacatactataacgttggttgagatatttcttcatgcgaaaacaattttaattcatcactcaagtataccaaaataaattaaaaattaggttagtggtactatttatgatattttaaaatattttttgttaaatttaaacgcacatgaatttttgctatacacataaatcagcgtttgtgaataatcgaaactagaaaaaaaattttggagaaggaagatgtatacatacatatctataatatagtaaaatatatcacaggctcaatcatgtaaaagatatacactatttaaactgtgtatgcaaaacatttatcaatcatatttgtaacctttaaactataggaagttttttatttgtcgtgtgctttatacaaaagcacatcttgcccatacttagaagcagccatgatatggatacatccctagtggatatgaagattagaaagcttaactgcttgtggtttaagtgtaacaagatagtataataattactgaagcttgattaaaaggatgtgaagtatataccaagaacgtcgccggctctaaagtgtttgcctttaggccaacccacagcgttaaaggtccagataccagagtcaccgaccgtgtacgttgcagcttgaacgtagtcagcttgaagcaacaacactgacacagccatgagagtcactatggctcgagccgaccatgatgcactgcctcttcccttggccattgatcgatcttaggtgaaagtttagagaaagagagagaaactatagagagtaaatgaggatgaattgaagagtaaatgtacaaagggtttttaaagaagaagaaaataagacattcaatgtttttattttattaaattgggtgtctcaacaacccatgatatatgttcatttattatttttggccacattgtctatgtagaaattgattatagacttaacttcggtttcttttgtctcattattgaagataagagtttggttttgacattgttacactaagttgaattttgtttctttgttttgaaaatgcttatatcaactaaataaggaacttgtggacaaagactatgtcatcaacaacccacgatatatgagcatttattatttatggacacattgtttctattggagatatagtttggttatgattttagtacatagtttataggcgaaaataggtttgaatttgtgttcttattgaaatgctttgttatattagtatggtaatgttgggaaaacgtacacatcataggttaaagaaccaacagtattgtgttattagattggactattgagtttggaatatgttgcttcaagtttctatttgtgaggaaaggaacacacaaatataaagtgattcaaaataacgaagatatattctacgtgagaagagaggtactgtaaatttagagtcacattgctgtgtataacatataagaaaactagatgtacaaaacctacttacatatacgccgagaggagaacgtggtcaaaaagaatcgggtagatctaactgtgaattttatgtctgtggtataaagattttagccgatgtggaaaccggtggacttgaaagaactcgatagcgtgggaagcctttgcaatgcaataactccagcagcgaaagcagcaacagacgccaaaacaaacgccggtaagtttcctcctccaaacaattgatcccatggacccgctccaagtgatactatcatctgtttagagccaaaaccatattcagacactatttacgggtcaagactacactcgaagtgagtggcattatacaagagaatgaaatttatcagtgtaattagatttgagagattgcctggggaataacgattgcgagattcaacactcctatagccaaacctggagtgaggaaatgaaaccattagggattactgaaatctaagatttaagtacaaaaactatgaatatagtgaagatatgaatcttttcacagaccttgaccgccaccggaatcagcagtgacttctgctgtgacagagaaagggacactgtatgtgatctgcattaaagaatggttttatcacatattttagagaaatgttgcaacacgaaaagaataaagagaattacggttgaaagaaagcacatacagctaggggaaaaccaaggagtgcaaaaacgattacggctgcggttcttgttgtttcgtttccacgcattatgtattcaattccatttttgtcatcactgagagacatcaagctgattacagctgttcccgccatgcaggcaaatacagtaaaattgctcaaagcccatacaacccgagcacccatccgctgacacattggttcaatgagaaatgagctgatcccaagaacaacctacggaaacagggaagaagaatattcaataacgggcgagtaattgaattttgaagagcagtgcagttaaaaaacaggttattataacgattcttacagagtttagtagcaaaccaagtgcaccttcacgtacaccttgatcatagagttccatatgcaaactatctcctgttggatccccatggtaaacttctcttcccatccaatctgtatcgaacagaaagaaggggaaccaggataactgcaaagaacaagaccacaatcaaaaatataacagaagcaaataattttaaagatcattaaagagtttaagaaaagaaacagtgtgaaatatgtaataactgatcataatttttctttggcactcacccatgtaagagccatgacgataagaactgagtgcatagccggtggcaaatgccttaaactagttagcaaattcactaaaacagatccagggccatcaacgtaggtctcatcttgatgctcattctctgaattgccaaactgttcatccgtatcacgttccactctctcatacttgattccattggcagtaccattatttaattttgaatgctcaaggcctttggactggagatcatccaacaaaggtgcagaatcttgtatgcgggtgggcttgttgcttgtaaaaggaatctctttagcaaaatagattgtgacaagagtacatatagtgagaaagacctgaaaaaatgatttaaactcttaaaacatatagaacaatatattcagattttagactatgaaacaagaacaaaagccactgggtgcaataatataatttcactttcaaaatcacctcaaaaataatatagacatacaaacagaacgcattgatttgcgacatatatgaatcacaagtcacaatgtacaaacgtgagagtgtttcgtaaagaccagcccattccattgcaatttagaaagcttagtaagatgcatgtgtcagaaaattaaacatactgcttaccactgcaagaagaaacgctgctttgagatttccacatgcagcacaacatgctctactagttaaaaaagggaaccatctgcgcagtaaaattgcctgatcatttaacagctggcggaaaatgcaaaattgcaaatgaggaaaaagaatacaagattttgagaataaggatctcaaagattactcttgccattttccgctagcaccggcagaaaacccaaggatgttcccaatagccatccacaagcagaacacagcatttgcagtattccgctgatcaggacctagggacagcaagagacatctcattagaagcacagcatattcaatctgattctagagtttgaatagaaattctgttctgttaagtgtatggttatattccattattacctgatagatcagctagaagagcacgagcaggtccctgaaaataaaaaagccgaaaacatcattcctggatacagaggtaatgactagtaccattcactcaagtacattgcagaggcagatctgaacctgtactgtattgtttgctagatccaacaaccaaaacccaatgataaagacaacagctgccctggttcgtgtgcctttgaaagtactgcatttcaagatacacatcaagtcgtcagttactttaattttgatacattccataaaaaacatgccattggcaggggagcaggagagttacctgcaatgttcctttgaatctcctaacagatacccaatgtctgcagaaaatccgattattatcacctaaattgcaagcttttgtttagcttatataaaacacaatgtagccagctatctcctaaaagaaaatcaaaacagaaatcatatcttctattggcacttactgctattgagatcatgaatgatccaactagaataaatggtcgtcttcttccatactttgaagtacatttatcactccaaatgccaacaaaaggctggacctaaaacccaacaaacaaataagtatgaacaaaatggggcagaaaaatagtttctgatccaatataaatcaaaacttgaactctcgtgagatcattacgtgcaagatagtaaaactgctaaaattcttaaagaaacttttaacctaccacaaggcctgtaattgggccgcacagccaaataaacgaagaaaaagcatgcgatattccaagggtctgcatcaaccaaccaaatgcaacactgttagataaaactcaaaagggttcttcagcaacaagaaaatcaaaatacttccagcaaacagatatttaacaatagttctatctaccaccataactacccacctgatacatatatgaccagtacaatactattctaaacacagtctaatctctgattatacaatagttccgaaaaaggctaaggtcttttatatttttacaaatgcttatgtaatccaatgaacataaacaatctagctaaattccaatgtcatatactcttcgataagccaatgctatagagttccatacgaaaatatctcatggctatgttggtgacaacaactacctaacctaagtattagaattcattgattcacctacaaagtactcgactttctcgtacaaagctacacaagaacaaaaccctcgaatctaaattgctatagagaaagccacaagtgatagaaatggtaacaatgacaagagtaatagtaagtacctgaatataaggagtaagaagagaaagttgcaatgcccaaccaaattgaactccagcggcaactgtacaactaagaaccaacgtcactaaactacaattcttcgacacagattcaccatcagccgaatcagaatgattcgaaggagaagcagattcagagaacgacgaagaaccagattcgttttgacgatgcttggtgaccgtctcaagttcaatttccttcctcaaattcctatacggaaccgagatcgacaccgagtcactcatcgtcctcaacacacagatccctaattcgtatcaaaatcaatttctcattccgatttagatttctagggttttgatctcgtcgatctagattcggagacgatgatcggagagtcaaattcgggcgggtgaatattttgatgaaatcgatttttttgaggtgattgagagagaagacgcggaagtgaagaaggaaggaagattcgttttacagggaaccgttgatttgtagattaacggatgagattaaaacctaacttaatagtcaacgttttcgtctcgggctttgtgtaatcagcaccgttggatttgatcggatcaaaaccgttgcttcaatttaaaggaagagcggacgaaactcaccgtcaccgacaccaaacaaaaagtgtgtgcttttaaaaaagtaaaacggtgtcgtttgataagagttgagagtgggcctgtagttttttgtagctcggcccatttttgtaagaaattcacaactgtggtacatttagcccaaatattaagtctattagaagaaagctgtctcattttttgttagcatacacacctaaaacctataaaacatgtgtcaagattatatgattcatagctatgtcccttcttctattttctgatgccttacactgcgaacactgtgattagtgattacattggttcaagtttgacttcatgaaatatgtttggttcaagtttgcttctaatgctaccattcaaatccaaactctcacaattgcatattattaaagaaaaaaggataagacgtctcaaagaaatttttttatataaaatcatatagggtatgttcttattaacgtatatatgaacatgtgttactaatttaaaaacaaaatcattttgtaaatttgtgttttacaacaaatattttgtgggagattttaggtgctagcaataataagtaatgttaattaagagagttataaacattttttcactatttaatagtgtttttttcttcttaccaatgtcactatttacaagtatatgtattttctaataactaatgtaaacatgtttgtaaaaagattatataacatatatgtgtgtgattgtgaaggtgatagagttcttcttaccaatgtcactattacaagtatatgtattttctaataactaatgtaaacatgtttgtaaaaagatgatataacatatatgtgtgttaacgtgatagagccggattaaacgaataaaaggaagaaagttagaaataaaaaggaggaaaaaggaaaaagacgtgtgcctaacaaatgtatcatgtattggtacaaaaatgcaaagatgatacataattattaatattattcttgcttgtggaaaatgaaagctaatagggcacacaattgaattaatacttacgtctctctttctccatctcttcccttgtccctctcttctcctttccttatccacgtgtacatgactcttatgtcccatcttttttttctttttcttatcatcaaaagttcaaaaacaaatccttttgagtttagttgttatggtgtgcatgcatgtatgatgtatccgaaccaaagtatagtcgaaaatccaaattttgtattctttaatggttaatggttaattgagaagttatagccgagtctcatacacttgttgtccatcaaaactgataccattctcaatagtatttgaaccagaaaaccactattactcacttttgtaaaagaactatacatacgcgccgttagaccaaatatcacttattacaaaacaaattttttatctataccatgttataattttacataagaaaaaataaaataaaaaatcggattattccattcaaaaaagcatttacataaaattcaagcctatataggcaatttggtagcattgactcggtttctccacaaaaaaatgaaccttattacacctttggttttatcttatttgagattgatgatttgatcatgtgccaatttttatttttattttgttataaaaaagatcaaggttaataagttgattgaaaaacagtaataagtttttttagtttaatcatgtaattacatttgacaaaaagcacgtgttgaacgcggctatgacccaaataaaagagaaaaaaacatatgtaccataacttaacacgtcatctccttaacgtcgagcacgtcaaatgcttacgcctgaaaataactccttcgtcatttctcaaacgacaaattcaaatattaataatataaaaactatatgtttaaaaaaaaaaaaagagatgcgttattacaataaatttaattttctaacttagtgattggttggcaattttgtcgttctctgtcgatagatcataatttataatgtgatatttacatatatacataagaatggggcttacactgtttcacataataactccattaaagttgataaagaaaaattataatggtcattaatcattattgagaatgtaaccatcgatattgaaagatagaaatgtggaaagaacgtgaagaaataaaaaagaatcacgtcacgtggagacagctcttttacgaactcttatatccactcacttcattaaatcatttaaaaagtggactattttttaaaaaagcaacaatggtttgtgcatatatttgtaatggttttttttctaaaatctttgtgtcatttaattgtcccaacaaaaccaatacatcatcttgcttttttttgggtccgatttgtgcatatatagagtgttcatatagaacggagtatatgcgaaaccttaactcgactaattaagttcggaagctacgtccaattataacaaagttgagtcaaaaatgcatcatcccctgaacatcgtctcgttgaccggacatcgagactatgtgctatcgcaaacaacatgtgatcaaattcaagagacatattaatagatgacaatacgtttttaggttaatggtagatgaaacattagctttgttttttgaaatatatgaagaaaaaaagagtactatagttgtttatggttctcgacatcatgcctttgtttttgtcgaacaattgtttcgtgaatgtcatgggataatacggtttcgtgtaagttataacgaacgagacattaggaagataatattgactagctacagtaaataaagttagattggtttaaaagatggatcttggattagtcgtaaaatcactttagcatgcaccgtccaataatacttcccatgggacatataagacttactctcacacaacccacacgtgcctgttacgttcttgattggataagaatggcctcgttcgatggtcaaagcctatagtggcacgatatgtaatcaaattgtgtcgatcctttaatttttactttataagatcatatcaataacaaaaattaaacattagatttgatcatggcaaatttcattggtgcataaatttcgcaaagggaaattgacctgatcagtagttctgcagttatacacaaatgctattaaccagtaatggcacttgttgaaatagtaataataaacgtacttaacatgtaaaaacatcataatagtgacatgataatgtatagacagcctcacgtgcatagtcacatgtttcatggccctagattactcgtcgccagctttctcgtattcttacttgttccagtgaacctgatctaacaaatattctctttcccgtacaattcgttgaaaatatatacagtataaaaaacagttaatcgatcgttaacggaaccacataatgttaaacgtattgctaagccaacaattaaacgtttaaaaaatgtttagcgctaagccaacaattagaggataatttattttggttacccgcgttatatactttataaatgtgtatttatttgatgtaaaacttaggtatatgatgttaaatgtactttaagtaaataagtctctcctcaaaaaattaacaaataatactcacatataataaattttacatgaaaatagttgtatatgtattaatcgattggctagacaaacacatttgttattttcaggtaatctacaattttgattgccttcagtcatagaaaataccatcttatcaaaaatagtatcacattaaattagcaatctcagctaattactcttcaggtttttttttggagaagatggttagaaaacagaaggttaaaaacagtaaaaattagtgataaaagatgacagtatgatactataatgaggttaaaaattatatataactggtaacattttgacagtttgaataataaagtgatagaaatataaaaaacaaatataaatataagcaaaaagtaattaaaatatcaaattccccctttttttttctttcttctaaccacctgttctggtagttttctctaatcatgtcatttaattgttccattaattgataatttttaagacacgaccatcaacagttaaaattacaaattaaattcatataacaacttgaaaataaatagatgttttttttgtatatctacaatatgatcattaaaaatggtcttagaactaaaaaaaatcggtaaactgctaaacacgactacaatacttaaccaaattgtaaatcactatgattgataaaaaaaaaaaaaaagtaaaacaacactaacattactgtactatttttataaaacaacactaacactgattcgtgaaagaacaacaacaagtacttggtttggttataatcactgacattttctatatattatcatttattatgattttgtctatttgtttcaaaatacaatgtactttcataatatagaggtgttaataaaaaaagaaaaagaaatgaaaatttaatgacgtgggattttgtaaacaactttttcagtaagtaattaaattccttttgaccactgaaatttaacagctgaagtactctgaaacatctgtgcattcaactctgaaaagtagattgtttctttttcctgatttcctcacgctcataaaagaaaaaaatactatatatttctagttaattttccataaaatatcaattatccagaatataaaatatccttatcagtagcaaaaattggaaaaatatttatattgttttagaaaattggaccaaaacatctctaaaggagattaggcctttctactagctaaacaatggtttaggtctccagatttatttagaaagacattaaatgtgaattaaaaaccaaatctaactctttttttggttctttaaccaaaaaataaaaactcttttttttttacagctaaccaaagcaaatctaatttattggaaaaatacccaaaattaatatacttttttttttttgcgttagttgatatagttttggttctctaattagtaattcttaattttcaactttataattggtgaatgaaaaaaagaaattaaatattattattattatttttaatttttaattttaatattattatttagtcaaattgattttccgtttaaatttttttatttgactgcattaaaatttgcatattaaaattaaaaagttaacaaaagaggaataaacaagagagagagagagaaaaaaagaattgttcctctcaaaagattttaactttgagctctctgagaaaccaaagcttcactctgattcgctctcgaatcaaaagagacgacagagaaagaagaagaagaaacgcgaagaacagaaacagctctcttaagcttttcttaattattattataattttctcttcttaatccccaaatctcgtaagtctctcttctccaatctctgattcgtttctctgcttattataataatctgttaattatcaatcaaacaaaccaaaccccttttgattttatctctaaagtatcaatttttaatttctcttcagctgatggattcatgaaccagatcggctgatttgagtttccgggtttgatttttttccctttttgtgaaattgggttggaatctggagatctggatcttataaagctggaaactttacgtgtgcttgatgaaccgattttgattaggtgattggttagattcggaaatttgaagacttgttaatttgggtttgggattgggattgatctgaaaatttgtagtttttggaagatatgttggaagatcgatcaccagattcgtgtttgagtacaagggttttctcaagctctcgtctttctgaatcaaactggtctaactcttacatgtatccagaggatgatgataagctcctcggtaatggtaaaagagctttggaggttgttggtgaggttagacagaccaaatcacttaaattaatgggtttttcgattatctatgatagcgattcttctgactattcattgagtggtggggaggagcaagctgatgctgctattggtgatggctcatcatcaaggcaggagcaagaacagcaatctgattttaatgacaatggtggtgattcttcggattctcactctcttatcaatgagattgggagggacaattcgatcgactgtttgatccgttgctcgaggtctgattatggttctattgcttccttgaaccggaatttccgttctttggtaaagagtggagagatttatagattaaggcgacaaaacgggtttgttgaacattgggtttacttctcttgccagctcttggaatgggttgcgtttgatcctgttgagagaaggtggatgcagttgccaactatgccttccagtgttaccttcatgtgtgcagataaggagtctctggccgttgggacggacctgcttgtcttaggaaaagatgatttttcttctcatgtaatatacagatacagtctactcactaattcttggtcttctggtatgaagatgaactctccgaggtgtttgtttggatccgcgagccttggagagattgctatattcgctggtggatgtgattcccagggaaagattcttgattttgcggaaatgtataattctgagcttcaaacttggataactcttccaaggatgaacaaaccgaggaagatgtgttcgggagtttttatggacgggaagttctatgtaattggaggaatcggtggtgctgattctaaaggcttgacctgcggtgaagaatatgatttggagaccaagaaatggactcaaatccctgacttgtcgcctccaagaagccgtgctgatcaagctgatatgtcaccagcagcggaagcaccgcctcttgttgcggttgtgaataaccaattatacgctgctgatcacgccgatatggaagtgaggaagtacgataaggagaataagaagtggttaactgttggaagattgcctgaaagagctggctcggtaaacggatggggacttgcttttagagcttgtggagagcggttaattgttattggtggaccgaagtgctcaggaggtggtttcatagagctaaattcttggataccgagcgacggtggtccacctcagtggacactacttgacaggaaacattctcctactttcgtatacaattgtgcagtgatgggttgctaaaagaacacacattcataatactacgactatccatttgaagaccctccagattcttgttgatgggttttagcttacaagtcaaaagacaccattgaaggtcccacgctccaacctttatgcttcttcttcttcttccttatttgtttcccttacaaaattttcaatttgaatacaatcatctctgtattgttagaaaccagacaaaagtcccaaggagattccaaaaaaaaaaaggaaaaaaaaaaactgaaacaggtttataataagttcgttaaaagttgaagctttttagagtttgccagatctggttaacattgttgtatgtgtttttaatcaaatttgttttctaataatcttgccatctttttggtctttgttcacggttttgcttttgagtttaattctttttctatttttgttttgctttacctttctttaattttacaggtcactttacaacgttgagtttgaagtgtttgtcaattttatgacgacaaacaaaaaagtgtcacttttgtttttttgttggggtaaggaggggcaaatgttatgtctttatagatgtgtcctttaagatatctcaatctgttgcttgcaagttatacaattttttgttaagaatgtttttggactcttgttttagttccttcagcttttagggtctttagattttttggtgaagataacaacatattacaatctaagttagtattttaccaatcggaacaactcatagtataagtaacattaaccaaagtaaatttttttcaaagagtagttaaaatttcttaattacaagataaccaaagtaatatgtttttagtgtttctaattttctgatgatatatttttttttgttatttagatattttttcttatatacgattatctaatgtcttttaactttatcgtctacaactcacacacgtgtactgcttgatttcaatcgaagttcggacacaatgacatcactagcatatgttatgcttgaaattttagacatgtaaaaatctcatagacatagatataaatactagaaatcaaaaattgaaactgaaatataaaatatttagaaaaatataaaatatttagaatagaaaaatataaaaaatttagcagaattctctaaattttctttatctttattttttcgtagcgtaaatgtaaaagtagacacattagtatgaaatatttgtatcgaacagcatcatgtcacatatataaacaatattctcatgattttgagttctaattaatattggttgacaaaaaagagaaagagttaaagatgcctctttcttcaacatatcagtatcaccctctcaattcgattttttctacaaagaaatatgttatgttctaagcaaagcccaactacaataaatttgggcctcataatgttaaggcccatttactctaaatctcgcagggttttaagttttgatttattctctactcagcaaacgccattatcgctctgtagaaaagcttccattttcgtagaccactctcactgagaagatgaattctcttcatcgtgtagtaggattgatcagcagaacgacgactacatctccaatttctcatacccgtttcaatctcccatcgattctcgtcaatttgatgtccacaaaatctggaaacgatgaagacaaatggaacgacgcttgggaatcagcttggttaccagatgatctcacagataaaatccgagcaccatgggagagagatgtgaacttccctgtaaaagaatcaacggcgacggcgattgaagaaatcgatgtggaagcaaaagcgttcgtagaggatatgaatgagcattgggacgagaggagagggaagagtgggaaagtggagaagagagaagagaagaagaaagagattggagatggagaagatgaatcatcatcatcgctttatagtttggagacgatgaagaaggattataggttgaagaaacaaagagttcatgcttctctgtgggttaaagagattgagaaattggaagaagctaaattggatgattctggatctggtggtggagctgatgatattgataggcttcttgatagttgctcagagtaagtaatgattctgtttttgccctaatttcgattttgatttagggtttttgttggatcagtcttgtgttatagtttacttcactagttttgtggtttagctaatccttgaaatggttctgtgacttgtttttgagattgctctgaggatgatttctagtgttgatttggttgtaagtacatgccttaggtttgaaggaacgttttagctaaatacatgaacaagatttgtgatatgcttttgtgtacgatcaatctcacaagcatgtttattttgtgtattgagttttacaagaaacgttagagtgattgttatggggaattctggtgattttgatgtatgttttcacttacattcttatgtttgaagatcttttttttttttttggcaaagatgtttgaagatctatgatttacaatttagctagatatgtgattttcttatgcacaatctctcaagcattttcatttagtgtattgagtttagagagaatgctatgggggattctggtgatattttgattgaagctttcacttacatgcttatgtttgaagacctgtgattaacgttttagctaaatacatgaattaaattcgtgactctcttgtgtacaatctctcaagcatgttcatttagtgcattgagtttcaaaataaacgtcacagagattgctatggggataccttggtgtttcagttatctttgcatgctttagttatgtttatatatgattgtggttgaagatctgtctgcttgttggtgattttgatctttcaatgcttaaaaacgttcaggattttcgattcggtagaccatgattttgacaaattagaggtttcgagtggatctgaattgaagaataagcctgatggttgggaatcaacagcaaaggaacaagatggaaacctctgggagatgtcacaaagagaagaagacattcttctccaagaatttgatcgtcgcactgccttctgcaaatttcaggtaccaccacacaaatcttcatacaaatgttctgttctcttgcaatagaacctaccaaacttgagactttctagatttcatcagcatgttcttgaaatttgatgcgcagatagctagttttataaagcaacacatattcagtaggagaagaccgattgatgggtggaaatacatgattgaagtgattggtccaaatgcgaggaaagggaaaggaagtgtttctaggctcccggctttatcggatgtgtcgactcagccgtttaaagaagaaaccagcagtctcactaccttgaagcgtcggtagaagaaactagaggagttcacaatgtttgttagattgttaaatgatcttcaactacttgcacttgttaaaggccggccatgtcctctgttcctacagttctaccatttcgggttttatattagcatcagttcttcaatcatgcaatttcttgttagcttagttttgaaacgttgaaacaatgggtcttgtcttagatgttgatcaagaacagaggacaaatctcacccagtagaaactaacaatgttgaaaattaaagcaaatataatcagatgagagacagagaactaagagaaacaacaaaccatgttcttgagaccaaacaaaatgaagaaacagatgtataaagccagttaaagagagaaaaaccgaaacatagatcaggttgacaaaaaaaaacgcatagataaagcgcacaaaatgacatgcccattggaggacgcctgacttgagtgtacgagacacattgaagtaactcaacaacacattgaacctattttgaaggaggagctcaacttggtttttacataggcgcttacacattgttatataggagcctaggaacaatctagaaactagggcaaccttatctagagtagacagctgtattgtagcctagtcatcacatccagactgtagaacattgaacctatcttgaaggaggagcgcctctgcttttggtttaacgtttgttgcttcttttgcaggtacaacaggttttgtcatcttctgtgtattgctgatggactctacgcttgggcttttatcttcttgtcccaatgtagttgagttgttctaaatcgttaacatcaagatcctctatgtggtttacaaaggtgcgaacactacaagttgtcctaaacgcttcaccaaaaccttggatttcaacacgttggagagtattcctttcgggattgaagtagaaaacataaaatggttgtttagatgtgtacttgcgcatcgaaaacactatttcacccgaagcagtggctccagcaatggaaaggtgacgatggaagaatgtatcatcggtccaagtgtaggcatatttagaccattcctgtttctcaacatcttctagaacccacacatgcaactcgttagtggcatcagcgtcaagattttcgtccaaatactcatcgagatccttcgcaaagtaacaaatctcatgaatgtcgacatcatcctcccaatagatcacatctaacttgcccttgtagttgatcaatagacaaaacttttgtacgccaacaaaggtgaatttctcagacgtcacatcaaagcaaactatcacatactcataatatctgtaagatatgtcttcagtgtgagctaagaaatacaaaacaccattgatgcatatcccataatgtacatttaatatttctccatgtcagatctccagctccaaatgtaagaactttactacgaccaggaccatctacataaggaagggacaaggccttgtattgcttgtcaatcgggtcaaacccgaaaaaactatacgcctttctataagtataacgatatggtaagatcgcataccgtcctgtgttggggttacatattagaggtctacccacgtatcgaccacaatagttatagatcaagccagaggcgtagccaattgaaacatatcttgggtcttcagacagatagatcggtattgacttgtctggagagaacttcacatgaaattcagcggctgctacaagagttgacgacgttttctcatatgtattctcaagctgaggcgatgagaagaatttcatactgtaatcttcttcaattccgtagtctgcgatggcgaataagagactcggcttagcggaggacctggtctggaacaacttcttgaagtatggactagcaaacattgatgcacattgcttcgacacgcaacgaaaccttgccactgactttgaatgcaatctcgacaatatctcctcgatgagatcattcgttaaggaagatgaatgcctgattcttttttttgaactgaaagatgaatacatgactgcggatcgaacgaagaaagatctgttaaaacttatatattatgtaataagccctagaaaaaacaagtaacaaaagacgtagagaaacctagaaatacgagacctagctaccattatatattttccgattgtagtcggttaagtaaaacaaaaatgggctaattttaaccttcaagtgggccactagcaataagagatcttcttgttggagatcaaacctgcaacaagaaaagaaagaatcagtgtgatgaagatgagaagcaaagcaacagaataacaagcgaagaagaagatgggtcggagatgactcgtcaacagaggactgcagctttggttgaggcctaaacaagagaaagtgtttttttttggttagcttgaggttgaagtttagttaaagcaaagtagtgtgcaagtgttgctgttagaattccaatgtagtaattatgtgtttaagagcatgactgtgtgtaagtgcgtgtgtgttgacagtgttgtgtaagattgtttccaagtttttttatcaatgtagtcttataagttcttaaacgtgtacactacaaactggaacaaaaacagagtgtgagagatagagagaagagcgaactaacgtttgtgagtcctttcaacacttctttctaaccacccccattattcttttgaaccacccccattcttcaaaatagctgctctaatatcagaaccaatctcattatcactaacttgcctcctccaacatagtaactgaagcattcatgtgattttccacttcataaccttttaggcttccaaaagtctcacagaaacagagcaaagccggagcataagccgaagctagagaaaagactgagaaagctgctgtagaagctagagaaagggtaaatgctgaagcaagggttagggcagaacgagccgctgctgaggcacgtggaagtgcagctgcccaagctaaagctaagcagcagcaagaaaataacaatgatcttgaatccttctttagctcagtttctagaccaagcagtgtgctccggtggtctagatgaggaatatggtgaagcgacaaagttcagaagcattgtttgtgggctcgtgtgaccagatttaatgattgcatgctcttatctatcacgggtcatgtctgtgccactcatcaagcactaccaagaagccaagagagtttgaagatatgtcaaagctacatctaacttttgagttcaatttacaagtgtagaaaatccagagttgttcggttactcaagacagtgattggggtggctcaaatgaagatacaaaaagaacacctctggtgtatgctttcactcttggatcagcagtgttttgttggcaatctagcaagcaacaaacagtggctcaatcaccagcggaagcagagtcttgttggtgtttttgctcttgaataattgtagaagcattgcttccagtacagagcatggtagagaaaacaaaggatgaaaaagtggaaaaacttcttttattattctcgacaatttttatttccacttctttattattctcgacaatttttacttaagacaacatacacacttatctatatgtttacatagcttactctacgtaaccgttggtaaaagttgtaacttctccgacaagttacgtctcttactcacaccctaagccacataatgttaaaacaaatgcaaaaaagaaatggagatgcggggtatcgatccccgtacctctcgcatgctaagcgagcgctctaccatctgagctacatccccattcatatcaacatgttttgtatatttattatatttatatgatcaacaaaattgaaaaaagtgtgtttttttcccagctgaaatctacttttatttagaaaaaaattcaccatattctcaattagaggtcttcagaattggtacttctttttttccagttttttccagtcaaaatccctactgtagttgtgttttccactaaccttaagcagtaactggttcagtgctgttttttttggtatatatctgcagtgaattttgctgtaaagttactataatggctcatacacaatgtcaattaggttcctcttccatgtttcatctccttcaaagttagactaaaagtataaagaggagaaaagtacaaaaattgtagaaacataagaacactatctatacttaatcaatcaagtaggaggtgaaggaggcgatgaatctacgcgatggtggaagagcttagttaatgctcgacgctcacaatcctgaaatgaaaaccaagttgattatgatttttatgtactcatgaaagaactgagaccaatgatcactctcttatatacttttttttttctttctattttaccttgaacatgtttaggcgcaagggtctatccgaattcagtctctgaagtttaaggtatgtgtatgcaaaactcaactgatctcgtgaggtaaaccgatcaacttcattgaaccaaaggcaagtgaagaggtttgacattggtgtatgagcccttacaataaaagaaccttccggtacatctaacaacaacaagacataacactcaataaacattaaacaaacaaaactagtaaatgtgtatggtgtgagagaagttaagggttgattgattacttacaacttggaagaggagaattaggatctgaaggatcaaatttcttgagaccatctgatcggtaaaacataaactgttcatcaatggccgaatggttgtacttattcagccgtttgttctgtaacacttcatcccacacacaatgccggtcataatggttggagatagcgaattctgattttgttctccataagaagaagtcaatgatcagcataggatctgtagtgagtctcatcttactatctagccaaattgaatacctgaaacaagaaatgaggataggtataagacatttaagtcactgattcaagtctcagagcttgagtactagccaactgacctcacctagaagaaggaaaaaggcggtgtgacagaaatttcggaaccttgccagtctttcgcatatcattataaggcaaattgctcactactacagttttccacaaaccaacaaatccttgcttgtcaggaacatgcccttcactagccagtttcgatagcgtttgctcatcaacaaacatcacaaagcaaacatttcgcttcgaaaactcactaatctgaagaaagaaacaaagcaaaataaagctccacatgactgatgagtctcacacagtctaaagcataagctaatatctactaaaatgataaagttttaacctttttggttgcaggtctccttagaaaatcagagcttccaaaaatgcaagaagacacagagactacacagttcttcatataggccctatccttttcgctcaaatcaaatccagttcctttgacaaaaccacagtgaattgtctgatttactgcagagtaagatctctctctttcactgagtgtttgatgccctccaaacctagggttatcatatgtctcagtctctacaaagcctaacgaaaaccgagtgaaattcaaataatcctgaggctcaagtatgcgatcagcagattcagcaagtggaacttcacaaggtaaatctgcattatatgtaaacaatctagccttagagttgagaaaccaacactaacacattaattgaaaacctctagagatacaaaaatccatacgcttggttctcttcttgcttccaggtggtctttcgatgttggatttgtttaatcctatatcaatctccgatgaaaccaacatatgactgttcatgtaagctgcatttgaaaccaaatccacttaatacaataagcttttgtagtaggtttttacacaaattcaatcattaagacaaagtaaaagcttacggttttgctcaaaatgaggtaagaactcagaacctacaccaaattcaaaagtgttgaattaataatctccaaaactgagagaaaacaaaaagaaagacattttctttagttctcaaagcttaccatgaaagagtagtttatggccagagaacatgcaagagaagaaaaagagtgacacaaagaacaaaaagaaatgtgaaagcttcaatttcacaatacgaccaaactttttgcctctccgaagaagtaaaaaagaattatcattgtgaccagatggattcagatatgaagaagaagaagaaaacaccgtgcttcttctctccggtaacattatctaatccttaaacactgcaaaaaatcagaccaaatcaagatttctatgtctgagagaagcttaagctaatcaaacatagacaaaatccaagatgcagatttggaagaatctctcacacaaacccagaaaacaccagattagagaaaggaaataacaaaaactctttacctgaagcgaagatctctagctcaccatgaaacctacctggtggcgatttagaactgtatttattcctttattacagtgttaattaattaataatgtattaatgtccaaattgttgattaatttgtacgaaggctaaagaaaaggctttggtgtttttgtcccacatcgctaaactatgaatcgctcgctcttggagttggtgtatataatagaagcttgatggaccgaagaattcatacctttctcggccttttggctaagatcaagtgtagtatctgttcttatcagtttaatatctgatatgtgggccatcggcccacacgatattaactctattttttaagggagaaagcccgttaagatagcttgctatctgggctttcatgagtcgcccatgcgttgcactactgcacgggcctggctcaacccgccaattttaaagtcctaatttgatcctctaataactttatttcagtctttcttaaaaacattttactttaatattattgaccactctttcgattttggtagttaatgtatatatcgttgatctgattgaaatggctgggaatgattttgagtttatggaactttgatggtgctacttatattgcctgctctgtgaggcctctcgttttcattgtagttcagaaacactttgatttgaagtgggaaacgtttctatagtggaagaagtgtcaaatatttctgtctcattttgggttgattgacatcagctagaagaaagacacctttctctgtaatctaagttttctggatcaacatttcagagtttggttagaattatggtaggcaagcagctggaatatgtggtcagaggagaaaccaaattcaagaacttgaggaagaacaagacaactgttggagggtcagtgacattcttgggagagaacatcgccactggtgtcaaagttgtatttttggttctgttgagaggttccgtcggatttatcatgtatcagtaattattcactttcagtagctgcttctcttactgttctttagataatggagcctagttcagtcttcttttggttctacttctcatgctaatgatgttgcttggcttgagtttgctaatttgttactttaaaatcctgcagaagatactaaacgctcgttgaaaaatctttaaagcaggtgcataccaattcagtttaatcgatctgatggcttaggatttatttctctctgtcttttcccgttgctgagtcaagaaaagatccgtcattgatggtgaaaagcacaaacttgctgatgtgaaatctgatgtgttttgttttatctgatttgaagctaccgtctatatattttacttgtcattttcagacctgacaaagcgatgagaacgtttctcctgtgttttgttttgtctgatttgaagctatcgtctctattaacgtctataattaagagcgatttctcagtacccgccaaactttaaggataagaacgtccaaagtcgtcctatgtctacttctttccctaggagaaaacgttctaaagtaagatttccacaatactaaagtccttgtacactgtacgcactaataagtaactccatattagttaactagttggttagaagagcttgaagattagatatatagtttttgcctaagatactctcaagaacgtacacacactcacataagctgaaacaaaaacagaggatacaacagaaagaaagtactgagaaactgggcaatgaggcagacgcttatttacttgtagcattattactgtgactgaagcaaaaccacttttgtccttttagaaatttctcacagaaccttctctgaagctggcctcttggtgatctcagccacccactcgttgacacgtggacgctccgtgaagagcttcttggtgggagttccgagcaggtattgaatcacgggaatgtggtgaagatcggtcaaagtgaaagtttcaccagccaaatacttgaactccttcagcctagcctcgtagacatcaaggaccttggctaacttagcttcttcttctgcaacaacggcttggtctgtgttcaagccatagttgaacttgaatacttgttcccaagcaagctttgaagccacgggatcgaactgatgagcttctacttgtattccaatggacatgattgcatactgagctatgttcttggagtcagctgggagaaggttggttccttggttttcgtatcggtgagctatgtactgagtaatcgctcttgattcgaagagcttgaggtctccatcttcaaaggctggaacttgaccaaaaggctgaagataggaaagaagttcaaacacaaaaaacatttaagattccgatcagttacgtacatcaaaaaagtttggtctcttgtcttacaaaacaacacatagatagataaatatacttacgttgcgggagaggaaaggctccttcttgtgctcaccgtctttgagttcaacatgaacgagctcaaagtcgaggtttttctcatggagggcgatgaggactctcctggtggaagtggaagctgggtgtccgaaaactttgatacctgccattgatttggtaactaagaaactctttgaagaccgagaaaaagagataaaagagaaagagatgtgatgtttgatgttgaaggtgaaggtgatgaaataacacacaagtaaaatagtgatggtattttttgttttgatcaaaagtagtgatagtatttatacagaagcatttctgctttatccctcactgtttatagtaatattatctaacagataataacgcctctacaagaccgtcgcaaccaatattgactagtcttcttcttggtggatttttcaaagctaaattggattgattaacgtttgaatatttgtttttacactggttatgagataaagtttttaataaagcattcaatgaatcagagaaaaaaattaaacaagtcgtagtagtaacggccaaatgactcaaacttccacctactagcttcatctagtaactttctcccttttgtgatgacggttttaaagctttctcttgatgtgaaattcgcatcttaaccaaactagaaaggtatgcagtttattctttttagtcagatctattgaattggttcagaccggatcaattcggattatgctgatcaagattaaaacatttggttaagataaccgaacctaattcaataatgtccaaattgttcttttgtccgaaggctaagaaaatgttttggtattgtcccacatcgctaaataattaatcgctcactcttggagttggtgtatataaaagaagcttgatggactaaaccattcatacctttctcggccttttggctaagatcaagtgtagtatctgttcttatcagtttaatatctgatatgtgggccatcggcccacacgatattaactctattttttaagggagaaagcccgttaagatagcttgctatctgggctttcacgagtcgcccatgcgttgcactactgcatgggcctggctcaacccgccaatttgaaagcccaatattgttctttgtttcatatttttatttaatcattgttaaatacttactttgcgtcgatacttatcattaaccactctttaggtgccacgtgtggaatatgtccctcctcaatcaaattcaaaggtgaaatttttacacggcgccgtctccttgatctcgccgtggaccgtcgtcattgatcacaatttagtgattctcttggagcggttttagatgatgaattgatttgcttttgttatgtttatgtggcgcttgttcgttttgtgtttaggaaagagacacaaagaagaggctttttttttttttttttttttccaaagaagagactttgttttcgatgttttgaatgttgatttatgggcacattgccacattcctgttgatttcattgaattggatactttagagagacagagatttcagacgaaactggactacttacgacatctaaacaatgggttcttcaaaaaagagtgtagagtttatgatcttcttgaaataactggtaatggtttcactcggggcaattgaacattaaacgttacttggtaatcagaggcagagcactgtgattgttatctttgtgaaaatcgagtgatctttcctttaaaggtttatttttctcatgttatgatacacttaggggtgctttaaaaagatttgattttctttatgttggcatatgatcattatttccttctctctgtggaagatattaggaactgacacatagctagagacagtcaagaatcctagttttgatgtactgttaccactttgttgtcagataatataagattgttatttctataatcatcatctgttcctgaacctatgtttggggtttttttgtattcttttggtaacatgaagtaatggagatgcagcaaacgaccacacaagactcttctccttctcttggtgggctcctgaggaacgaacccctttcacatcaagacagtgaatgtttcaccacaaactctatggaattaaatagaaacttctctcagccattttttgtcatgtgggatcagagtctcatctcattaccaacttgcctttattcacttgacgaaagagagcaagcggatgctttgaggcaatgtccaaccaaagaattcaaagatgagtaatcttgttttgctttcttaacacaaaatgtcttcttgcttttgttgttcttctctcatccacatatgaaaactaagtagttagatgattagatttttatatatagtgtggtcaattattttctcatatcttttgagaagggtacaatacttatcttcaagatctgtatgtttcttggttttaagcccatactagctatactagctttgatgtcatcatcttggtttcatttatgtcttttcttgaaatctaattagccctttttgaaatatcttacagagaaatatcagtgaactggataagatcatttggggtaaattcgatcatttcccttatgagtaggctacagagacaaacatctttgatctttctttgcatttattgtcttagtaaggcactttggttcttttctctcatattgtcaactagcaattaaggttttgtctaccttacttttatttcagacatatacatggcctttagatgagtttcaggaccagatcttagatatgttaggtaatatgacactttcattgatttaagtttcctcattaatagctctttctgtcaatctagtgtacgtttgatttaaccctttcaagctaagacaaaactcatatctctctctcttgagtcttgagactaaatccaaaaaaggtaaaacttggtggagccaatttttggaatgtctctctgcttattttgctgaatttgagatctgtgtttttaactgaccataatgttttgttttcactctccaatcatttgtcactctttgagtaactttttcttaggtgcaaaaggtctctaagaaacccttttaaattgatttgatcatggactcaacaagacattattataagtttacatatctttctcactcagtagaaattatagataaagagagatcagagattgaaatctttttcttttactttcttgcaatcactgactataaagaagagatgattgtgtgtgagaaatcgagctgttgctgatccttcttcgtgtttcgaaactcttaggtttagtagtctccattgggaatctaggaacgtaactcggttgtgtcttgttcatgctgcttcttctgtctaaatcaccagaaaccataacagatttatgactcttgcagctcatcaagaaaccattccctccgctgctgctactcgatttccgtctctgcggtgctgatttagcggtaatagggattcgaggaatctgagtaggtcggtttcttcttacaggacttgttgcacattctgacataacagagaaatctgctgcacttgctgtcactatgctccactctacgcttacttcacttggcgcataacacgtaggtgaagctggatcacttccttgcctcgtaagaaaaggtttagggttccctgtaagaccctctatctcgaaaagatccgagcttgaatcactcccttcactctttgtgtcgtcctcctctgttctcgatttccatggaggcaatggtagtttcttctgaacaacactactcttcttctcaatagccactggagatccaaaaacttcaagagacttcctctgtgataactcctcttgcttctgaatcttgatcagttctgtgttcatatccgcagaagatctcattgtgataacagagatattcggatcagcgcttctcttgaccgaggttttctcctcgacatctacagaatccccatcagagcatgcgcatttacaccccaaatttgcgagaaaactcttcttattattggtcaccttttgaatctgaccattactgttcttcttttccttgaaggaactgttgcagctattcaccagtttgttctgaagcaacacgctctgactattccagcttgattcagaccggacactcggagtaccagtagatttcttcgcgctctgcttcgagtcgacgacggttctctcaacttctgggtttgtcagagacagaacactagaaccttggtctgaatccatgtctccattgaagtacttctcagctccaaacacaccaatctctggatcttcaggagctttcttcaccattttcttctcatcaccaaactcctcttgttttggattaatgctcatgtttagtgttttgcttggttccatgagcttcttggtcgtgacaagagcatcttccttgctgctcaagtaagaagaagaagaaacatagagactgctgtgactgttgttattcttcatgaaatcaaaagatgtttttggggtactagcagaagatggtgttagtgtcaccattttctctttggtagctttatatttttttctctctttattgcttgtgtgtagatatgtggaattagggtataaatagagtaacaagacgatatgtttgatagctgtttttttttttttttctgaagctaaaagtgttatgatctgatcaatgtgagtgggttccagtttgagtcattggccagttgttgtgtgtgtgaactgatttatttatatatttggataatgaatctttgccaatcaatggagaataatcgaaaaataatgttacccccgtgaccacaaaagaaaggaattataatgatatggtcttaattcgattaggacttattaatacaacagtactagtatactactcacattgcaactggatctcttaaataattttctaacctgcagatttcagaaagtgtttttttttatacgttcaatattcgtattttgtacgtagacgtttagcactactatacgtttttaagattccgatttaaaacacatttgctactatatttgtagcaactaaaaccaactccaaccgtagttttttagtagaaactcatacaattacaaaaaaaaattataaattaaaaaagagatgagagagaatctctaaaattgggaggatcgtttctattattcatataggttgtttttttttgttttttggatataaaaataaaatattaatactttttgtttttttagaaactatatgaatcctatacattggaggtgctctaatgtacaatccgttcggacacgttaattacagatgggggtgtatggctatatacttcacattcatacgattgttgaaccttgtgagataattgagatgattagctttagcaagaagagatgattttgttggattgtgtgcaggtttaaaacaatctgatttgcattgaggactctctgttataaaccaacatttttttattattcttaaaggactctctgttataaaccaacatttttttattattcttaaaggactctcttaattacttaaactaaaattttgattagcattgtatgttaaaataaaataatacattggataaataaattaaacaaaaacatacattggataaacttattaaccatcatacaattaacaaattaatgacatcgtcaataagatcggaagataaatgattggattttaccaatggtgtcaaagagttttacatgagaaaaaaagtagatttaatgtattgtttttcttaattacttcaaattaaagtattgtttcacatacttaataatgggctgacaagttttcggacacacattttcaaagacatgttaggattgagctgacaagtgaatctggatttacttgtattttaacttctaacttttttcaactagaaaagtagtggatatggatttcacttgaggaacaaaaatacaaaaatagaaacttagaaagcacgagggatgtacgtattttgttgcatggggagatattgacaaagaccatcgagttgggttttgttaaatatagtaatattttatgttatgatttgacgtacgctctataatttatgtgtaatgtatattagaaaattcatggaatcgtatcttgtcatataatacatatcaaataatgtgtattgtttttgttaaatataacataacgaaagattaattaattcaaacataaaatctatgtatctgtcaatcaagaatattgtgtaatgtagttaataaaatatgcttattagttgctatagtcgacgtatcacgtatgaatggttcgaattgatcccacagcatacgtgtttgtttctcaaccacaacctttattcgtccaactaaaacaaaaatgatcattatgagatttaccacaaaccacaagcatgactacaaatatcaaaactaataaaaattgattatataccaaaacggtatcaccaatttatgatgtactacgtatactttctagtaccgttatctgatttttaattatcattatataggatttttttttaaatgtctcttttacaatatttatataaaatcatattgtaatttacaaaagctgaggtgattggtaatcctaaaggcttccatatgcatataaaatcataatttacaaaattcttagatatctcgagagttttgaagattgcaaaccggaatgtgttccaaaaagttgtaatcaagcggcaattaaaaaactctaattaacttaactttaactatttttgatattgttcaaagttatggatttaaggattgataatttcggtttgagtcaactctcccagtaaacaaatgctagcaatataggggcgtttcaagttgcagaaaaacacactaattgtctctaaagtctacagccagaaacacaatctgataggtcccaaaagcaacaaacacacacaaaatccctttttaatggtagtttaaactacctatttgttttgattttctgatcaatatatggaaacaaatgaacgatggaaatggaatcaatcatgattcttacaacttaggggagacggagagatggtgaattgcataaacaactaaaagaaaagcactcattcaaaatcaacgtgaaccaactcaaccttcatgtccgcgttatcccttttggtctcacaatctattccatgttatgcccattattgtctatggataatgtttggcatataccagtgaaatttgttggacgaaatggtttaacatcccgtatattgacaaagaggtcgtgggttcggaacctttgttttgcaaaaaaatacgttttcttaaatttaagtataaaattcatataaaaatacggtttaggtatgaaaaatgccctataaatttatttgggtatgcaaatgcactcagaatgggtattaactcttttcaccagtcgagagactagagatagaacaaaatagaacaataaaacaatttaggggcttttttgcaaatatcaaaacccctcctaatttaactcttccgccgccaaatgctaaacccccaaaggccaaagcttctcctcctccttcacttcctcttcgtctacatcaatctgatttgagggatcatctcctgacgaagtttagggtttagggtttcatttatccctcccaaagtttctttctagtctcttcaattacgatgatctgcacggagtgcgaaaacgacgcctttgacgaagaagacgacggatattactactgccaacgatgcggtgttcaggttgaaaatctgatccaaaccggcgtcgacgacggcgatttaatcggtgaaggtggaggtactcagggcgctctgtataaccccaaacatcgccggactgaaccacaaccaatcactccttcacagcctcgttttacagatgacacaagccgttactctcagtttaaatctcagtttgaatctgaaaacgggaataaggaattgccccgggaagtgaagagagcgcctgacagttatgtcgataaagagccaacggagcctgtggattttgcagcagagactttgagttatgagaattattacgatgaagcaagagatagatatgttaaagcttttcttatgatgatcacttatcagtgtgatgctttggttgacaagtttaatgtcactcctttgattattggtttggttggacctatctctttgcgttatgtggctctctctggcgtctaccataaagattgggccaataacgccattcgtgattccgagcatcagtcagaagatggtagaaatctattgacaatgttgtcttgtttggtgtgattctatttgttactaagtttcactctttttggtgtcttgcattgcaggtgaagtaaaagatgctaagaggcttaaaagacacaaagctgagccgcgtaacatagatggtaaaagagcagtgacgatatggtttggtatacttaaaaagactatgcctttatcgagttctttggtgatatctttccttgcttgtcaccaagcgggagcgcctgttctacccacggatattgtgagatgggcacgagaaggaaagcttccgtatttgtcttgttttctcgatattagagagcaaatgggagagcgatcagctgcgtgtccggtgaaagtaagtataatggctaggccttttcaggttatttctgctcagatgttggaagcacgagcctctgtgattgctgatactattggtttgcctttgcctcctgtgaatttctatggtatagcttcaaactatataaagcagttatctattcctgaggacaagattcttgatctggcgcgtcttatacagaactggtcattgcctcctgagttatatttatcgacgaatgagcagaagcttcctagccgtgtgtgtgtcatgtctattctgattgtagctattcggatgctttataacataaatggtttgggtgtgtgggaacggagtttggggtttgtcaatgctagtgacggtgattcagagacaaattcaggtactgcagagaaagcaactgaattcgatactcaggagcttctgaagaaccttgaagctaaatatcatgaggtcgctgcagaaacccttgaatccgagaaggatctggtgtcatatctatcgctcgggaaaaacgagttctttgctggtttagaagaagattcacctgacgatacatacagaattgttgataacttgtggaatggttatccaaaagacgaggtaagaacctgcttcaaattcttattaagataatctgaagaactaagttcttcaaaggttcaatataaagtgtctcttttacatgtatgttgtaggatattgaatgtctacccaagagggggagagactgggacgatgatgtatcacttaaccaactttcattatacgatagcagatttagcgatggaaacaatccttgtagtagctcttcaaggagaaacgaaagtgtatcaataggtcttgatttatcttcttcagaacaccgagaatcatcatcaccagagaaattaaaagagatagcgataaaaagactaattacagacatgggagatgacttgttctgttacataccacctcgtgtgaaggtaaagagactagactatcttcagtacgtgaggaaaaaagaagatggagcattgatatacgcggctcatgcagattactacattcttttgcgggtttgtgctaaggtagctgagattgatgtgaggaatatgcatagaggtgtgttgagctttgagaggagattggcttggattgagaaaaggatagatcaggttttgcatctaactcgacctcttatgacatgtaaacactgttgtgatgatgggaatattggagaagatcaagatgattgataagttcataagaagcagaagaatacacgtgcaaactggtttgcagattttggggtttaaatctcattgtttagagatcttgtatactgattgatgtagaaacttctcctgcgtgagaatggtggatgatgagctaacaacgatgaagtgttagccgtctcctttggtttgacgataaggaataagagtttggtggcttgttacttatcaatgattcatatatactaacacacattgttcataatttttgttgtaatatgttcgtagagtattttgtattcttctggtaaatcaagttaatggtctcttctgttcttccttaaagacgaattatttttaaaaaaaaaatacactcaagtttcaagacaatgtgtgaaaaatagtaaagcagaatttacaaatttgtgcaaaacctatttgacatttttggctacaagtaaaatgaaagatctaaccttccacgaattcaaatgatttcaatcctttactcatacaatttacggacaccaaattcttcatttgatttacatcgtaccttgtaatggctccatgcttgtgacattagatcagaattcagacaggatcgtcatgctgttgttgtgtagatgtagtcgcatgagccacggcggatgatgatattcccggtgataccgtgaagtgaactgttctaggctgccctgactgaagcaccaacgcaaactgtgtagccaaagctgcagcttcctgttcaatcgggttacattaagtcgataccagtgactcagtttgattcataaaacagtaagaaaaaaaaaagactgtccggaaaaatccttgcatgagttcttatactactaacctgtctctgtcttcggcgctgtagaatactgatggcccaagccatgatatagcatggaagaagaaatccagcagctcggagcaggacaagctaaaataagaatcagacaattttgtggtttggtgttacaacttaaatgcaactgagacaaaaaataaaagaaaaagaaaaaaggaagaagcttcaatgagcttacagatagtatcgaagatgggtcgtcttcttcgccatcagtatcatctgttatggtcagtgcgtgtcgtaagagaagaagagccattaactgtgaaaaagaaaagtgtgttttgcggttatcacaagcgagggattgtgttgagacttaaaatagaaatctgtcaagaagctttaaggcttactattagagcagctgagcgacagaatgcggccccgcttgcacttgaagctgtatattccacatattcagactctaaataccgacgttcagcttcagcaattgcaaggagacgaggatcatgcacatccaaacctgagattgtccatcctccactgcaacgcacatgccaaagtcagaaacataataataaccaacctcagataaaattctgagcagcagaaacatgaaattaaccatacccaatgtcaatagttgtttcttcaggctgaagtggaggtggtggagcggtatatccaggttgataaggctagcaagagaagttaaagaccatcagatattgataaacccaatcagagtcacatagagaattctactaagttggtgatacagatgcatgaacgttgctcagcattcagatatacttaatgtgagcatcatttatccatattcataccaaatcatgacttgaaagtgacaattggtgtattaaaaggtggaatgcacgatcttaaatcattcatcatgtgtgatctatcatcgaatatatgcatagtcatattgccacatcgattcaagtctataatcctaaagattacaacaaaaaaggtaacatacctggtgacaaatctcgcatataatgtttcccttttcattgcaccaacgctgaacacattttctatgagcatactggtcaaaaacataacaaaaaattcgtcaacagtcaattattctagaacaaagccattgctcaatatagaccaaatggtttaagaattagatgatgatgaaaactaacctttaggctgccactgcaagcacaagggctctcaagattctcaacaggagactcatcagaacaaatacgacattcaccagaaacaataagcggttcattctcatcatcatgatcatcatcagaaatatctaacgccttatcattaaccaccggcgactctgatctcatctcctcaacctccgcattaaccggagacatatgactgccatatgactgctgctactctcagttaataaacctatcatttctccttcctcctccaaattattcaacgaaaaaatcgaacaaaaatccaaatgaaatccctaacgaaatcagaaccatatgagatctaatctaatcgaattgaatcgatctgacatattcgaaaccacataaccaataatctttccggcgatcaaatcggagataggaatcagaaattgaaactcagatttaagatacagaatcgaagaaaatcatcacctgtaaaaatgttgtttatagcgttttgtcgtctctgaattaggaggagagaatctgtagaaacattaaccaaagagagagagagagacgagaagaactaattggtgaaagctccccagaaaattttctgaggcagatgcaagattttcccgcaaatcgagctacaatagaaaaatcgctttttatagcggagaaaggaataaaatgaaaactacgacgtgtgagaaaaagtttatggccgttgaccaaagcgatgttgtaatttacacagattctaaagggtattttcggtattgtataaaactttgtcgcgctgtaacgttaacgacatgtttgttccctgtaggataacattcattaattattttaatcttttgattacaataatgatgtaattttcttttatttcttaataatgtgatttataaatcatgattgggcaatgcatgatctagttgttcaatgacaaaccaaggcataattattgaaaatatttaagcttatggtatgatattaaacagatatgtgagaataattgttgtgtaagataaaaaaatttagtaccataatatcattaggacattatgattatggaaatagcttaaaattctagtaccattatatcattaggggatttctcttttgataagaacgtattctcaataagttaaaatactactaggagacaacatttgtttagtcaaacaaataaagattagatgagacaagtaaacattatctaaagtatttcgaaactgcaaaacagcaaagacctctcaactacatcaacatctaagaaaacgattgaagacttgaatgattcccaaagtagacggataattttatataagattcaaaaaaaactatattatcgaagttaattatatattttgatcatacaagtgttaataatctaaacaggacttcattgaaatcataaaccctccccacacaatatacgaattactcacctaccccatgactctcaagcaaatagaaatttctaaaccaaaccgttgatacataatttcactcagatgctggcttactttacctctactccattagagaagatatagaaactttcagaatcataagcaattagagaggcaggaagctttgcggaaaaccggtttataaaccaagatcatctaattcgagtcactatgtaccgacctttctcaaggtcgtaaatcgttttcagctgcggttttctccacttagttaccaaatataccaaaactgtcataaggatcggtatcccgatgagatagtgaagcgtcttcgggtgattactgaaaagagcatggaaccaatggagattaccagaggctgcatgttgagaggtctctgttgcagtctgttgaatgaatgcacctaaagcccaatcgagcggtatgtctcctgcttgattcgcatatccgattctgcccaaaaacaaaaaacggtttttatttgattgaatcatgtttacagccattaatctaagtctttggttagggctctttaattttaccaacatacctttcatcatcaagaggaatgccaagggtatcgtgaagcaatgacacaatatatgcagatgagaaacaataccgaagaagatcctcttcatggagtgatgggtcttttactctcaactttgaccaatcttctccacagaatctctctccggctgaaatcatattagatagccacgctttttctcccaacccaaagaactgttatcaggaacaaaaaccatgtttataaattataacattctccataaatagcagggacattgtgttgttgaactaactgggtaaattctatctacattaggagcgtgataacagatatgagagaaagtgaataccttagaggtgtaaaagaagttttctgtcgctaaaaatcttcctcgaagcttaggcgtgaaagttgatccaatagaacaatgctgatacgagcatttctctgcactcaaaagtttgagtagaaatcagtatctattaaagacaacaaataaactaatacaaggaatgaaaatccagcaataatgattaatattctaccatttccatcttgcaagattgttagtgcagcagatcgacactgtgagtaattacccccagcttgaaaagaatctgagagtctgctttcttcagctaaaagtccagacaaatgcttttgtgtgtttgcgtcgaggttatacccttttggagcacaagggtctgtaaatattttttcccgtgtaggttccacagcttcaagaaataaaacactgaatgagtggaaaggaaaagaaactttgctattgacttgaaaacgtaatctgaactttagaaaattcccaatcagtaatttgatgatccatcaattatacttatataatcatcaacagcttacctgaattatggtctcttgagagaagtgaaccccataacttatcatgtgcagcattctgaaacggaaaaaaaaattaatagcctcgaggacattgccaaaagatgaaatccttcattctaaagatttcagggagggaaacaaaagatcagaaacaatagttacggagacaattgtttggtcagttggattaagttcccattcaacgattttaaaaaggaataaacttgtttcttgtgtcaagttgtgaaatctattccaaacacatacactgcttaatagaaaatacctgcccaaaatgaaggaagctgtgactgtagagattgtatgtgacatttccaaatgatattgtacgtgagaactcaggaggcattggctcactagacacaaatgtcacctaaaagaacatacaaacactcatcgtctgttgcaggatagcttttgactcaagcataaatctgaaagggaaaaaaaaacaactaaacctgagcagaagccccgccaagttcaacaattccggttgttttaagaggatcacctccaagtgaaccgagagcaaagtttgcaacaacccaagcatatacaccctcgtcagatcctggcaaatttagtatccaatgattagctagtaacaataaaggagcaacaaactctcaaatcaaaaagagcgagacagaaactgatacaactccaatggcattagataaaaagactcacttttgaacaaaagagaagattttgaaaactcaccagagataacagaagcccattcatctcgaaacaagaacccagaagatttaagaactcttcttgcaactcccagaatcttttcctgaacaggtaattcaagcaatctcattcccgccgtcgccattaacctaacttcagtctcaatccacattcctttcggaactctccctttcgcaaactcaaccagctccgtcaatgacacactcgctccatcaggatcatcagcaaacgccgataaacccggatgcaacttcaaactagcgtaattcgctcctctgaattcaaaaaccggtttacccgactcaatccggtacccaaacacatggattcgtgtccctgtacttccgccgtcgatcacgacgctataacgaagcgatcctctcagattaccgccggagaacaaaattgaatagcaaagaaagagaacccccaacactacagatatagaaccaactgttaacaagagattcgatttcgcgtgtttcgaattcggttttgttagcgtataggtcgatgaagaagacggtgctcggttcccagaacggatctggaacttaatcggatccatatcggatttactactactactattcttcaccctagaacgggcatgagatcgtcgcatcaacaattcaaaaaccgccacgagaacgaagaacaaggaaccataagatctggaagaattcaaatatggaaaattgaaattaatatatattttcgtgaattttcgattttttcttctttttttgaagcttttattgaaccgagaatactggagattgagagggccgccgttaaccagcgccggtgaagctcgccgccgctctcaagtctccgatgtcgttctcggtgatagaaataaaaataaaaataaaagagattaaaaagcaaaattaaattggaaaataaattggtcgttgtagcgccttttacgatttttatacctaattattaaattacaattcgggtcgggtcgggttatttgattattaattttgcaatcgggtcatgatcacataacaggcttatcgttatcctcaagatttgtcagtttgaataatgagaagctcaaaatcagagctttaatggcgatatcttcagcttcactaatatcatcattctcacacgcagaaacgttcactaagcattcgaaaatcgacactgtgaatacacaaaacccgattcttctgatttccaaatgcaattctctaagagagctgatgcaaattcaagcttacgcgatcaaatctcatattgaagatgtttccttcgtcgctaagctgataaatttctgcactgagtctccaacggagtcttcaatgtcatatgcacgccacttgttcgaggcaatgtctgaaccagatattgtcatttttaattctatggctcgtgggtattctcgcttcacgaatcctcttgaggtttttagtctcttcgttgagatcttagaagatggtattttacctgacaactacactttcccgtctcttctcaaagcttgtgcagtagcaaaggcgttagaagaaggtagacaattgcattgtttgtcgatgaaactagggcttgatgataatgtctatgtttgtccaacgcttattaatatgtacactgagtgtgaagatgtggattctgctcgttgtgtgtttgatcggattgttgagccgtgtgttgtttgttataatgctatgatcacgggttatgcgagaagaaacagaccgaacgaggctttatctttgttccgtgaaatgcaaggtaagtacttgaagccgaatgagattacccttttgagtgttctgtcatcttgtgctctgttgggatcgttagatttagggaaatggatacataagtatgctaagaaacatagtttctgtaagtatgtgaaagtaaacacagctttgatcgatatgtttgcgaaatgtggtagcttggatgatgcagtgtctatattcgaaaaaatgaggtataaggatacacaagcttggtcagcaatgattgtagcttatgcgaatcatgggaaagctgagaaatccatgttgatgtttgagagaatgaggtctgaaaatgttcagcctgatgagatcacatttctcggtctgttaaacgcttgcagccacactggtcgagtggaagaagggagaaagtatttctcacagatggttagcaaatttgggattgttccgagtattaagcattatggttctatggtagatcttcttagtagagctggaaatttagaagatgcatatgaattcattgataagctcccaattagcccaacaccaatgctatggaggattcttttagctgcttgtagcagccataacaatttggacctagctgaaaaggttagcgagaggatctttgagctagatgattcacacggtggcgattacgtgattttatcaaacctatacgcgagaaacaagaaatgggaatatgtagattctttaagaaaggtgatgaaagatcgaaaggcggttaaagttcccggttgcagctcgattgaggtaaacaatgtggttcatgagtttttctcaggggatggtgtgaagtctgcaaccacaaagcttcacagagcattagatgaaatggtgaaagagctaaagctttcaggttatgttcctgatacatcaatggtagttcacgccaatatgaatgaccaagagaaggaaattacgcttaggtatcacagcgaaaagcttgcgataacgtttggattattgaatactcctccgggaacaacgattcgggttgtgaagaatcttagggtgtgtagagattgtcacaatgcagcaaagttgatatctcttatatttggtaggaaagttgttcttagagatgttcaaaggtttcatcattttgaagatggaaaatgttcttgtggggatttttggtgacgtcatctccagaccaacaacataattttccgtagctaaaaatcatataactgtgtattgtttcttatagttttataaattgattcaaaatatgatttaacatggtaatcgatatggtgtcacctgttcaataattttcataagtgttagaactaataaaataaaataaaataaaatctaataagctgatttaacctcagactagttacaatgatttgttgtaacaaaccattttacaactggtgaaaaaaatattttcactacattgatttgttgtaattaaaagttaggtgatatggcaaatttagtgttgataaatatcaacatccctgaaagtagaagatagaaaataagtgtgacaagtgttatattttgattgattgctttgatttctatttttttttgtttcatttcaattatataacttcaattattttataatatttatacataaaaatatcaaaatttataattttcattctctataaatagatactattttcatttgatttgaatacaaaaaataaaaaaccgtgttggctatcatcatgagatcgtgtatcatattgcataatatgattgttgaggatgaacgagagacatatgctcaacattggacggattatgatcaatttgaggcaagtaggtcgagtacacaacaaccattctcgaccgaagtgctacccgtatttacaaatcatgtgcgtgctaggtccgagttgcgtgatttaaatgtacatcacgaattgcaagcagatccagtcaaacacatacgagcacaattcggaatgttccatggtgaatgaaatttttaagtttgtgagttgagattattgtattaattaaattattagtgttttcttacttgttgtgtgcttattgtatttttgcattttaaatttatgttcattgtatgtgttttagtaataataatttctatttctcgtttttattatttataaaagtttttaaaaatattatataaaataaaaacaaatattaacacaaaaataatttataaaattattttaatttaatttaatattaacaatgattaataatatgtaatcacaaaaacataaacataaataaaatgaaaaaaatgaaataaaaatggtggggtaaggtattgtaattttattaaacaaaactattgtaaatataaaagggagatttgcaaaactaccctttttttactaccttttgcaacaataccctttcgtgttgtccatttttaaaaatactcatttccttgaccagaatgaccaaattatcctcatctaataggaacatgtaattggaaactgaaattttcccgccaatttttctttccccgccaaaaaaaaaaaatttcgtcaaacatttttcccgccaaaaaaaaatattctcgccaaaaatttttacaaccaaaaaattgcttctaaaaatccttgtaattttttttttgcgggaaatagatttacaagggattttaaaagggttttaaaagatttacaatggattttaaaaggttttaaaaaattttacaagagtttttaaagaatcttcttgtaaactctttaaaaatcttttaaaaacccttgtacatatcttaaaacccttttaaaatctcttgtaaatctttaaaacccttttaaaatcccttgtaaatcttttaaaacccttttaaaatcccttgtaaatcttttaacacccttttaaaatcacttgtaaatattttaaaacacttttcaaacaattttgaaccctttaaaaatctttataaaacctttgtaaatcttttaaagccctttaaaatctcttataaatcttttaaaacccttttaaaatcccctgtaaaacttttaaaacccttttaaaatcccttgtaaatctttttaaacccttttaaaatccttgtaaatattttaaaatcccgtgtaattcttttaaaactcttttaaaatctcgtgtaaatttggcgggaaaaatatttttggaaaaaaaaaattggcgggaaattgttttttcaaaattatttggtgggaaatttattttggaatattttaggcgaaaaatattaatatttcattttgtttacctaaaacaatttccaaataacggtaaatggtcattaaaatttaaagaaggtaaaaataaaaatgacaaataggaaagagtagaattgaaaaagggtaatgtgaaaagggtattctcaacaattattcaagataaaaattgtataggtgttaaataataatgtgtaaaagagaagacgatgtgaagtattaaaagaaaaaaaaaatggatgttgtatataagtaaccattgtagatagtttaagcaagaaaaattgatgttgcattggaaattaaaaaatttcaataaaattagaaaagcaactctaaatcattacttattttattattttcaagaagttataaagtattaaacaattcgttgacaaataagtttgatcgacattgtgtgacaaatttaaaacacatcattaataacaacgaggacaaatacagttcagatatcgtctactattaaaacacttcttctataggagcaaagaaaaattgtcggcaacgaactggggaccaataatattccgagtttgagttcaaactgagtaattttattttgagaaaatttgccaagttaacttataattctggtttacgtgtagtaatttattaagttgttataggaaaatgagaaaatactaagacacatccaagaaagtttcacacgaaatttacttacaaaaagattgtttatttaatacttccgtatatagatatataaatatttaacacattaattataaagttcaagataattgattatctatctttttttgtcatctgaaattattatcgctcaaacgaagtaattctgaggaaagttgtttacaaactagttatttcattattgtctacttatataatagaattaaaaaaaattattgcttaatgcaatttagttttagataaaatcattaaacttaatagattatataagttagatatcaataattgggcttgcttaaaaacataaatataaaatattattgggccgttacgtgcatacaaaacgaaccttctaacaaacaagtgtgaacgttacgacttcaaaattaaaaaaaaacacaacaactatgtccacacgtaatctcatatgattcagattccaaggagaacaaaattaaaaacaaatctcgtaaacatacatacacttcacataaaacaaaaggtacagtatataccataaatctccgagattcttttgatgtatctgtccatttcattattacacaaactaggaaactgatatctctctattcacattcctctgattctatttctctttatatatattcacccattaaccatctcaatcttataaccctcaaaatcacaatcttctcttacaaaaaactttgaaagatgaagattcttctagcatcattgtgtttgatcagtcttctcgtaatcttgccttctgtcttctctgcttcttcttcctctgaagattttgatttcttctacttcgtccaacaagtaataaaatcattctaagaatgtttctgatgattttttataatcatctaatattgttttgtgttttattgtatagtggccaggatcatactgtgacacacagaagaagtgttgttatccaaattcaggcaaaccagctgctgattttggcattcatggtctttggcctaactacaaagatggaacttatccatctaactgtgatgcctctaaaccattcgatagctcaacggtaataagatcaaacatttctgttttaaggtcaaaaatatggtttaaggtaaaaaatatggaaagttttgtacataaccggttggtttgatttggtttggtacagatatcagatcttctcacttcaatgaagaagagctggccaacactggcttgcccaagcggttcaggtgaagcgttttgggagcacgaatgggagaagcatggtacttgctctgaatcggttatcgatcaacatgaatatttccaaaccgctcttaaccttaaacagaaaaccaatctccttggagctctaaccaaagccggtacgttttgatgtcaaagtacctttttattttcccggtttggatctcattggtctaactattggtttattatgtaatagggattaatccggatggaaaatcttactctttggagagcataagagattcgataaaagagtcaattggtttcactccttgggttgagtgtaacagagatggttctggtaatagccaattgtaccaagtctatctttgtgttgaccggtctggttccggtttaatcgaatgtccggttttcccacatgggaaatgtggagctgagatcgaattcccttctttttagtttccaatttctaaattcagtctcttgaaccggcatcgatcttttgttcatggagattggtttggtcaaaaagaagatttaatgtaataaaaatttatgggatattggataatgatatagttcaatttcaataatattctacgtatccgcatggtttaactctaaaatatatagtgaaaatagttcaatttttctctaaaactagaaaacaaatctttcacaaaaaattgctaacacttttgtaaatcagttttgatatgataaatttattttttatgataaagttaaatattcaaaaaaaaatctagagcattaacgaaactgtaactcaaaagtcgaatctaaacaacaaaaagagtatgtcaaaaaaacaatcaaccataaagagtttaataacaagcgccgagaaaatcttatctataaggttttcgttctccataatttagaactctcgatctgttttatttcttcttaataacaagagatgacgacatacaaaaaaacctttgatctcttaatataatctctatttcgtttttttttgtcctttaggttttgagttgcaatgtcctcggatatgcgtgacgagcgtttcttttatcatcgatatctttccgttacaaatagaacaactccaactacggcaacaaacttgccaacatcgacatcgaacatgcgatctacgagtttgatgacaccaagggttgcacatacttcaatgtcatctggaggagattttcccgacgaccgttttttccatgctcgtcatcagtccgctacggatagagcagcttcaaatagaagcagggcgatcatgcccatatcgacaacaaacgtgccatcatccacatcaaactcacctagggttttgcagacctcaatgtcgagacgaggtacctcgccaatgtcctcgtcgacgaggaggagtgtgcaagcatccatgtcagcacgagaaaccgtaccatcgtcgacatcaacgaggagcatgcaaacgtctacgtcaaccccggaaattatgcctacatcatcaagaaatgtgataacaagcagcgaagaagtagcaaatacattcactcaaacttcttacatacaatttgggagcctgtgggagacgaatacaactccttcaactaggagttggccgaccgtgccatcatcaaactcacctagagttttgcagacgtcaatgtcgagacgaggtacctccccaatgtcctcgtcgacgaggaggaatgtgcaatcatccatgtcaggacgagaaaccgtatcatcgtcgacatcaacgagtagcatgcaaacgtcaatgtcaacaccggaaattatgcctacatcatcaagaaatgtgataacaaggagcgaagaagtagcaaatacattcagtactcaaactccttacatacaatttgggaggctgtgggagacgaatacaacttcttcaactaggagtaggactaccgtgcccacatcgaccacaaacgtgccttcatcaaactcatctagggttttgcagacgtcaatgtcgacacgaggtaccttcccaatgtcctcgtcgaccaggatgagtgtgcaagcgtcaatgttggcaccaggaaccgtatcatcgtcaatgtcaacagtagagattatgcctacatcggcaagaaatatgataacaatgagtgaagaagtagcaaattcattcactcaaacttcttacatacaatttgggagcttgtgggagacgtttaaaactgtaacaaagttgtcgcgtgtagcgatggtggagaatggagagtgtgtgatatgtctggaggaatggcgcaaaggtgatatggagacggagctaccatgtaaacacaagtatcacttggaatgtgtgaagaagtggttgaagattcacgccacgtgtcctcagtgtagatacaaaatgcctcttgaagctgaagactagtgattatgatttctgaatcttctgactcagcatgagggttttgacgtcaacttttgtttttttaggagaaggtaatgaattcaattggaatcatgttttgtagaagcatgattaggatctattgttgaattcgtatgtgaagatcatattcccttcgaattttgtcaatattggtttacattaccaaaattaaaaatttgaaacataaccagttggtaaagtatgatcacttcatcgatcagaaacgtacgtaacatcatcgacatcgaacatgcggacatcgagtttgatgacactaacgaggttcatcgatgagcaaatatctttacgagcaaccgtttcgtcgacgaggacgaccgcacggttgttgactaatgaatcgccggcaacgatacgggcggtagcgatgttaccacgtgtagcgatggtggagaaaggagagtgtgtgatatgtttcgaggaatggagcaaaagtgatatggaaacagagctgccatgtaaacacaagtatcacttggagtgtgtggagaagtggttgaagattcacacctcgtgtcctcaatgtagatacaagctttcttgtgtatataaaagctttttgatgttgtgatttgagagattacaaatttataattgcaaaagttgtgtaattggaaatgttttgttgctttcaaggttacatcagaagaaagaggcttattgacttggttatcacaatcacctaaaattactctactggtttgaattatccatccacttgtgttgattgatttgaatcttcctcattggttgtgttatccctctgtgcttcattaaagacttgagtactatatgattccactatattcacctattcaataagcccctttatgatgtaacccaaatttttctttttgtctcaatatcgtttctactatatgacttgagtactacttgtaaatttttcttttttggtaggccctggtaaagaatgtcactcacaatttattcataaactaaaagaaaaaatatcatatgtgaatgcttctcggtctcgtggacccacgcgtatcatttacaaagagcaaagtaacaatatctggaacataagtagaagaatgaaatcttggcgacaaactaaacgcataattagctaacccatatgctagatagttaattagcttctcgatatacgtgaaaaaaatgaactatccagtctctcgaaagaaagtcatgacacaagcataccagaaaaacattgaattatactcgcttattcctgtcttaattgttattttatcatattctttcaacagatataagacgaaattctaaaaaccaattgttaaattgaccaacacaaaagagctttagtaatagtagagacaaagtgaatatattagttttttgcatgaaaaaaaaaagaaaaagaaaaagaaagttaaaaaaataaacattggggaaagaaaaatattcgtttaggttgaggcatggcgatatgaagacgatttgaccgggaggcttgtgattggtggatttttttcctactgtccgatttctttcttcctgtaggtatgtctatttcgttcgtgttggtccaccggattcccagaaacaagagtagctatcaaactgtcatgatgatgctaaatgtggggaaatatttccaatttagtggagcaaaagtcaatattaaaatgctaacaagagaaacagtgagaagcaagattttgattcacatgaggctaccaagagaccatggtacaaatagtcatagtcttggctgaaaaagtatctatatatacatttttaataaagtttttggttgaaaaatctctcaaatatttactattttcaatattaatcctaacaaaatctatttgacaaaatattgtctttaaaaaaatttacaaatcgactttatcaactaacaatttataattaattatttgtcttaatcttgcacatattaattacgtattatttgagaaaatctaaacaattagaaaagatctatactaaccatatatatgttgttctttgatcacaatattcatttacttgattctaaagcaaattagttattgacttttccgattttgttgctaaattctcgattttatgatacaaatttatctaatcacaactaattaatactaaatattattgttttaatattaaccattcattttatttgtatgtaattaaaagctaatcaaaggcatattctctcttttattcaattatatcctatacgattttcatatatttcttaaacaaaatagcatattcgaatcattaaattattttcccaaaataagattatgttaatcatgcattaattttcggaattgagaaaattgcttgctcacaaagctatttttttattcgaaatcaaaactaaccctaattgtgtatgagctctatctatatcctcactagcaaacaaatatcacaccttcattgtgtcttatgataacctttataacctctcattagcaaagccaacaaaaactcaattgggtgatacattgctaagagagaaaccaaacctcaattaaagtcataaggtataataatgtagatgaagacaaatatagattaggatatggtgttgctggtaaaggtgtgaagcgtctttgcctccttggtaccttgagaaatgtaatgatggagatgatagtgttcgcggtgaggatgatgatggtggatatagaggtgatgaagctgagtgggaagaacagttatttgcctataattctaaaagtatacgacagccattttgaatgatttcaactaaacatacggttagttccggtttatattcatctttgaatcttatgttgaaagcgagagagattcttgttagtgaaagccatgaagaagtagcgatgatcatcgatcatctctttaagcgtcaagactccgaagagtataaaacatcgcgtgcgctttacgacatctgcgtttcttgtaacccaggttgcttaaccctaaagcttcttaaagtctatcaatcttcttccaatggcattctcagactccgatcaatctctcaactctctgagaccctcacctatctgaaaaatcaaatcgtctcgactctctctatgaaatcaaaccccttttgattttatgccttacaatgcaagaaaccaaagaatctgacatcaagatcctcaggaaaatcgtgtcttttgtaacttacaatgtcgtggagttgcataaagacaaatgggacgagctcggtgattgtatattatccctagcgagtagcaaagaacctgtcaaggcttttcacgtcttcatcgatctgccaccagtctacaagagtttcatcgacaattttttggacaaaagctagtaatgtctttctttatccttatagagtcgaagattggagcttggctttacaaacttttgttaaaatgtggattcagcttgagaaaacagggatgacagtagagttactaatggcgttgatggagattcggatttcgagaggttcttctcaggagacatgaatctgtatcattacactaaagatcaatgccattttgtgttggcttccatgaacgagatcgaaggagtagtcggaacagagaccaaggagattgtgaggaatgccaaaatgttgattacagaaccacatgatgatcttaagaatggtagagaagagtttgaacgagctacgagattatattgcatcgagtaaaacagagtttcatagagcggtttatatcttccagtgcttaagaatggcgcttattgatgacgattttgtgattcctgtgatggagaatcttttcctagagataaccacaaggctagacccaccaagagataacagtagctgggtcttggcgtttatgggtggcttttgtttagcaattcacaattgatagagaagtcaagtaaagctgaatccgttgcacataagatgatagattctataagagagcttgtggaaagagaaatggaagttggtcttgtgaggagaggtttcagagatgtggaaacaactggaatgatacagtactagccaatacaaattcattgctttggagactgtatgcaatcaaaggcaatgtaattgttgagagaggagtgaaacaagttgagaaagagcttccagagaatgagtttgattggctcaaccttagtgctgaatagaaaaactagtgttttggtgtttattgggcctagaattatcaaaatatcacgtaatgggctcaatgggcctcaaagttaaatatcaataacttgggctgcaaaaaaatcaattccgattccgatcaagttttattttccgttcaattcaatttcatcgtttgaaaaccctaattttgtttgggaagattaagccatgggaggtcacggtggtttgaatattcttccacagaagaggtggaacgtttacaacttggacagtccgaaaggatgaagaagctgcggctagagaagagcagatcaaacgcgaggacgctagaaaaagagatgctgaatctcgtctcgaagtgcttcgtaacgtccgtggtttagcccctctcaccggaggcagagaagggtaaggatgagacggtggtggtggtggcggcggctgttgttaaatccacggatgttgttgtggagagtgttgaatcggaaaatgtatagattgggatatggagttgctggtaaaggtgtgaagcgtccttgagaaacgtaacgatgaaaatgatagtgttcgaggtgagggtgatgatggtggatgtggtggttatgaagctaagaagaagaagatgagtgggaagaagagcttaaaggagttgaagagggagagggttgagaaggaaagagagagagcccttttcatgaaacagagccagagagccggtggtttttctcggaggtgagttttgggatgaaattatacgttatttgcattgggtttgtacaagttagtagttaactgttgttacttgattcatatccaaagtattggtttattaacgctactcgatgcttagtgctgatagaaccatgtacatagtttggagtgtgatagatagtttatcaggggaatcaatagtttatcaggtcctatcctttagcatgttttaaagtttagtgaagcatggctgtctgttagtttgatggtagcatttagaccctaaaagttggaactctgtttacttgtttacttgtttcaacattgggttggtagctgataatcccattggttctaactagaacaggaactgcaacgtattgtcatcagaagaagagtatgtaattgaatatacgtgtagagatgtttcaatagatagaaaaaagaggaaatgatgtgaagtgaatttggtgatagtttattgcttcctgctcaataactaatactgcacgtctctgaacctggttattgcatagtactagttcatttgtgctgatagaatcatggtatatagtttaagagtgcgttttgaagacatcacagtctattgtcctgtcctaattgtcacaggtcctggaagttttcagtgcctacacagctactcttgtcttgattcattgattgtttctctaagcctgtacgggaaatgtggtagattttaacacaatatgcatttgaatgttaagagttttcttgaatcaagctgctgtttgtcccactcattgtcctaggtatttccctcatcgacctagaacctcctttttgacagctcaatacttgtttgcactaccaattccagagttagtattaggcagagattttttagtgagtgtgtgcatatataatcttagcctcgtaaccactttaaacaacacactagttttgattctgtggcatatcagtgttagggcctcaagttaaagaagtgttttggtagctaaaatcccattgtcccctacttgaatatgcacaccaaacttttagttttgagaacaatcgatgattgctaaaattagtttgtgaaatcacaaagatgacaaagaagacttgatccagagattcaaaggtctgaaaatccccttttgtcatctatatatatgtgtgtatagagaattagagatgtttcaacagatagaaaagtggaaaggatgtgtattgagtttgatagtggaaatcatttggcattgcttcatgctcaaaagagttatgtggcccttaaagttgatactcatagcaaaacagactttggaaaatgataacaaactagccaaaaagtcgaaacataccaaaaataagttgcgtcgttgaaacattaccaaaataagtactgataaaacgtaaaacgacacgatccacaaaacaaacgacaccatcccagagaaagggtccaccatactagaaagacaaaatagtttcatcatcaaaatggagggataaggagacgaatgacaccgttcttggcgatggtcttgatccgacggctgggaatgtcaacaggagtggagagcatagcgacgtcaccagagtagaaacggccacttgaatcatggctaaccgcaggagcttgaccagtcaccttgactcgcccattcgtgacagagacagtgaagttttctttgggaacacccggcatgtctgcacgcacgaatagtttgccgtttgggagctgcttcgactcataggccatagtcggttgtgggaacgcaagtggatgtggctgcaataccggaccggttaacgccgggtctgatccacaaatacaattactctcattttaaacacccaatctctcaatactaaatataattactagctaggaccagaaagttgtataccatttggatcggtgccacggagatctaccgaccacaaacaaagagaaaagacaaacatttaaagatgagtaaacaattttcgaaagtttgtgtaggaaaaagccaaacttttagatattgaaagtttctggaaatggaaatggaaataccttcacggaaacctgagcaaccaagaactgttgacaaaagcataaactttttatatcagaaaaatgatctataaacactgaccggtaatacattagatgggtaatagtactgaccggtgcaaggagagcggtgtggatcgatgcgagtcttggagaggataactctaaaaacaccgtcggacatgtgggtggtgatgcttgagatcgcacagcagctacagccaattccagtcatcgtttggtaacgacgttcggtggagtcgtgtgtgtgaaccttgggtgctttggcgaaaacaaccacagtttcctgcgaccggttatgataaacactcaagccgccttcatcaggaactccaggcaaatccatcctcaagaacatgtcttcgttcgctagaatcttgatctcagagaacccttttggcccattcgtctgaaactggttgttgattgcgtaaaaaccttctgctttcagagagaaaaaccaaaaaaatcagagaaatgaaactcgaatcagtgaaaatctgaacgaggtgatagaggaatcataccgggagactgaggacgagcactaacaggaacggccattgccatgattcaacaaaggtacaagctttctcagtgctttagggtttttgcatttagtggcttctggaactttatgggcatggatggggaggctacaaatggaaatatctaatgttctcaccctacgtggcatgtttacttttgacctttgacgaaatgtatcaaagagaatctcacggtacatattattagctgacattgaaaccaaaatcacagccgtccaatcttatctgtttgtgaggaccattgctgaaaaatcaagacttttatttgacccaaataaaaaatgaagacttatagtaataattgttgagagacgcgcgacgatatatcaaaatagaaagtttggtgaaaacgacagatcgaataaaacaccttctctgaaattagaaaaacacaaattcatcaaaagtttttattagataaacttgaaccacggaatataaaacttaatatttcaatgcccaatcaaaatgagcttgagtttgtaaaaattatactgtattttgttctacccaagatatgggagaatatattttacatgagcatcttttattaaaaaaaaagtaatcataacaagacgattttcagcataaaaaaaaagtttatcccaaacctgattaacctttaattttgacaaacgcgagttcatttgactgttgagttatttattaacagtttgatatgtaatcttttttattaaataataaatattttaaaaatttgtgtatatattaaaaagctgttaatatttaatccacaattcagtcaataatagaacaagtcttgaaacaataaaacaattattttacgttaaaaatgtaaaacattgtgggtttgttcctctaccaacatcatttaaaatgaaaccattttttaaactaaaacataactttatataatacggacgaagtatactttgtatcaatgtggttgtattagtttcttaaaatatttgtagacgttaaatccagtaatatccaaggaaaagctcatataaaactttaaattgtattttatccttaacttttggttgttttcaatattatcattcagaggaggggcttgtctctttgtttgtttttttgtttttcttcccaaaccttctcattttgtctctcaaactttgatgcaactcgggcttgtctctttatttataggggctttggtacaatcctaaaaatctgaattgataagttaacattaaaacaaacaaaaaagtttgatagttaaataattaatttgacgagtagaaaaatcctttttatcctttttatcattaaaacagaaaaatcctttttatcattatcatttttataaatattctaacttttctataattgtatattatcatatatttcatagattatttatttcatgacctatttaaatatatttccaaaagaaaaactatttaaaatattcttattttgtaagttttagtattataatttacaaatattctgacttattaatatatctatatattatcattttataaaaatgtaaataaaaattaaaatctgaaagataattaaaaaaagaaaaagacatgaacaaattaacccaaataaatttgtagaaaacccaatggtaaagacgataaccctgaaaacggccaaacaactcctatctctctgtcgacacaaaaggggatactgataaaaccgtttttcctctttggttttcgggccgccgacatttgccggtggttctattttgttacttgctttatttttcttctgttttcaataattgtgatggggaattttctgttatctcagattgttctcagatttattttcttcattcgatttctcttcacctttatggtgatgattgtaattctctttgtcgatgatatggttttcttgggacatctctcccacccttccgcagttatccccacactgaaacccatgattcgatgtgatgcagtcttgttctcgcagatttacaaatataaatggagatctcggaatttggtgtctttacaactatacaaacagatctactttggaaaatggaaactaccatggaaaaagagacaattcgggatgaatggataatgacaataagcaactatctatggaggagaatgatcggaagatggtttatgtcatgtacacaacaatgggttttaagcacaaccaagaccaatgacatctcattctatatgagagtctcgatcaatccaaaagctttgtgatgtaacatatggatcgttgcatatgactctcaactgcattaccggtattttatcagtaaaaagaagaagatccctaagcaagaaagtcacaccaaattgacggaaatgacgaagatgataaagtacttgactaagaatgcggcatgtattgcttcatcattttttcgttacaaaaacaattggttgtatttgtaatctcattgataatcatgtatactttgattcacattaataaagtttgtttagatgttaaaaaaaaaaatgtagaaaaccattaccagtttatcatgcatcaaacctaagattggtcatataccaactaaacaaagtgataaatgttattttctgtatggcaaccctacagttgtcttaaacttaagaaaattttgtttaggactaatacatttaatatttttaaagaatatcataaatatttaatagattaaaaaattaaaaaattgtaaatactctaatttgattatttaaaaatagatatataattaaaatatttatagcatgtgacatgttaaacgtaatgtattatatgcttgtttaaataaggtttgacacttctaaatattttaaaatttgatattgtaagcaaattttcattagaattctaaaatgaaaacatggattccatgcatgggttgaatttggtattattatataccaaacatatgttcatactatattggactatgtaaaattccgtaattatatgaaacaaacttctatttcaacaaccaaaaaagttaaaattcaaaaaagatctcctaaattaactaaaaaaaatagctaactaggacttattgctattgattccatgatccctatacttccttagttaatacattttagatatggttcatttataatatttagacttttgatatatgcaatcttattttgttgttgctattttttttttttcacttactattataatatatgaaaatttgattctggaatatataatatattaacaaaaaaaattttaacccatgttgtagcatgagtcataatctaatatgtatatatatatatatgtatatatatatatatatatatatatatatatatgaaaagaaaatctttatgttgagtcatggcaataataaatattgtttgacgttggtagattgtttttttaccgtctgatttccttatcttgtgctcatccaccgacttctcaaaaacaagaggaaccaaagactcatggattttaatgggagtacgaatctggagattgcgaattccaaaaagaaagaatgtacccaccgttaaatacatctttatgcaatttgtagcacacatagggaacaaaagagaatacgctgtcactaagtcacattggttgattttcatcttaaaaagttttatgagtctctagatacgctacatataggtaataaaagcataaaagttgcgactaaaaatttgtaagatacaccataatcatctctccaacaaaagatggcaagaataaccacaatatgaagatatgatgagacacaatccatgggatgtacaagttgcgcacactggcagggccggaatatctattcattgatgtcaaataaatttttacaaaaactgcaattttcttcttcatacacttgtagtatgcaattagtatatggcatccacaaaatactaaacatttataccctatttacttctgaaaactgaaatttctataatagattttttaagtaataacttgttttggaaagaaaaaaacataatactttatatatatttctaacattaaataatatacaattaattttggatttattcatgatttacatgttagacccaatcttaacgcctaacaatttatggagaattagtgctaaataaatttacattaaatatccatatatatactacggttcagatattgtttaaaattcggattattttttgcatgtaataatttaaaataattataaatagcagaaaatagaaaaattttaaaatttattccaaaaatggccactataaaaaatattttcctcgttatttgttaaaatttgataggttagcattaaaacaaaaaaaagtagttaaataattaatttgacgagtagtaagaatattcgatcaaaatgtatttaacatcttttaaacagaaaaaatcctttttcttattatcctttttataagtattctaacttttctataataaaaattatgtatattatcatatattcatagattatatttttcatgacctatttaaaaatatttccaaaagaaaaactgtataaaaatattattatttttgtaagttttagtattatttttcacaactattctgacttattaatatatatatatatatatatatatatatatatcaatatatcatgttataaaaaagtaaataaaaaataattagtgagcgaattaaaatcggaaagatattaaaatacaagacatgaacaaattaacccaaataaatttgtagaaaaccattactggtttaccacgcaacaaacctaagattggtcatataccaactaaataaagtgaaaaacgttattttctgtatgcacgaccctacacttgtcttaaatttaagaaggttttgtttaggactaatacaagaggggaggcagaaaaaggagtattgggtctaagaggcaccgcaagaaggagacgatctttatgtgctgatatgcatatgctctttgggtagcttggattcacaagttgttgtttaggagacgatccttttggcctaaaaaaacagaggttattaattagttatagatttggagatctctactttgcaccgtgatatgacaatgcaatttagcaaatgccactaaagagagttgtgaccagcatatttctaatttttattttttgtcatgggaccaaatccttaggtatcgcgtgtaaaacataaacattttcattttatgaatacttacattcttaggaaggaaaacaaaaattctaagtgtgtagtttcattcaatcttgcagcctatcctcttaaggaagtttcgccatacattacgttaaagtatgtgaaaacaaagaaagcaagacttcactttggatgatgcaaaatgttagaaaacaacaaaaacatgatgcaaaatgttagaaaacaaatcttataaaatagtctttaatataatgtacactgtgcaagtgttatcgtcgggtgatgtcgggtaatatagtgtacgacttcgctcgtattgtaatttgtttaattattttaataaaaaggagactgttctccccttctctaccaaaaaaagtatatatatatatatatatatatatatatatatatatatatatatttattttcgtgttttgtctccagattccaagatgatggattcgtactatagtgtttttaatgcagacgtcatgttgcaaataagacactttttggtgtttaaataacagcgcatgtgttcaatttcataggtatctcccaagtccgaacgatgacattcttctctcccactcaggtgtttttgaactacaggggagaacaactgcgtcgcagcttcgtgagccacctcattgatgcctttgaaaggaatgagatcaacttcttcgtagacaaatacgaacagagaggcaaagacctcaaaaatctctttcttaggatccaagagtcgaagatcgcgcttgccatcttctcaaccaggtttgtactattctttcaaattattcagaagattcaagaaaattaatcatccttattttgatttcagatacacggagtcaagctggtgtttggatgagttggtgaagataaagaaacttgctgataaaaaaaaactccatgtcattccaattttctacaaggtgaaggtagaagacgttcgaaaacagacaggtgagtttggtgacaacttctggacgctggcaaaggtttcaagtggtgatcagatcaagaaatggaaagaagccttggaatgtatccccaacaagatgggtttgtcgttgggagacaagaggtacttatccacttacattcactaaatcttcttctttttgtatagaattaagttatatattcttttttttggcagttctgaagcagatttcatcaaggaagttgttaaggcggttcagtgtgttgtagcaacgattggacttgaggaagaagaagagaatcattttgggaaaaagaagagaaaggattgcaaatgtgagcttcctgatttgaagaaaagcagaaccaaaaagttgtgacgtaagaaaatgttttgcaatttgtatggatatggactctcctttctagttgtgttatttatttattgaaggtacattaattttctctaaatgttgcaagattaatcaattaattaaggtcttatatcaccattctccgtgtttcccctgtaccacaaacattatattacaataaaaaaacaaaatccaacttcctcaagattcctcatttgatcatacataagatgtgacatgcttgctttctgaacctggtagattttcttagtttcacgcagtcggatgtttacatcttctaacatttcagaaagcatccactataactaagattttcttagtttctcttttgatatccactataatccaacggaaatgttggattttgtttttattgtaatgagaaaatccgaaagtccgaaagcaacacttttgatagcattttgatatttatcaatttttgatgtttatagagcctagaaatcgttatctgataaaaatacttttgatgtctattgtttttgtttttattatatatacttttgatgtctattgcgtaaatatcaatttttaagaatgagatgagaaaatccgattactctacttttgatatctatcattttttatttaaatgctatcaaaacatttctcattacattacaataaaaacaaaatccgaaagtccgaaagcaacacttttgatagcatttaaataaatgaatgaatcatactgattactctacttttgatagtaaattctgtgtaatgttaactatatatccatcagctatgattcgtaaaaataccgtaaaaattgatagatataccgtaaaatgaaatgataggtgatggatatacctatcagctatgattttctctgcaatgaaatgataattaattaagaacaattaaaaacaatgactatattattataatatatattatataacaattaaaaacaatgactatattattataatatataggtacgtaggtactactaagattacaaattagaaagctttgaaaaatactagtagtaaaaaggggcagatgattggtaaataataatttaaattgtttttagtaaaaaagggcacagacactcacacacacactgctttcacgacccatgtgagttttctttcttctccatcttcacttttttaagtagctagatgacaagacagacagctatctcctttttttttttacgaagaagaagatcaagaaaaaaatgaattttaaaaagggacctttaagagagatggtgggagagagagcaatagagagagaaggaaatccacccccacaaatagaaagttagggtttattggaaagaaagaaagagagtgtgtctctgtgtgtgattctaatagaggtgtagtacgtcgctttgctttcagtccattaaaaccattccataaccttacacagaatttactatcaaaagtagagtaatcagtatgattcattcatttatttaaatgctatcaaaagtgttgctttcggactttcggattttgtttttattgtaatgtaatgagaaatgttttgatagcatttaaataaaaaatgatagatatcaaaagtagagtaatcggattttctcatctcattcttaaaaattgatatttacgcaatagacatcaaaagtatatataataaaaacaaaaacaatagacatcaaaagtatttttatcagataacgatttctaggctctataaacatcaaaaattgataaatatcaaaatgctatcaaaagtgttgctttcggactttcggattttctcattacaataaaaacaaaatccaacatttccgttggattatagtggatatcaaaagagaaactaagaaaatcttagttatagtggatgctttctgaaatgttagaagatgtaaacatccgactgcgtgaaactaagaaaatctaccaggttcagaaagcaagcatgtcacatcttatgtatgatcaaatgaggaatcttgaggaagttggattttgtttttttattgtaatataatgtttgtggtacaggggaaacggagaatggtgatataagaccttaattaattgattaatcttgcaacatttagagaaaattaatgtttgaggaattaaaatcgaaacatactcaagagaagtcataagaatgaaagatgagatagagagcaaaatgaaccttttttgcataatggattatcaaactcacaaaatgtatggtttaagtattaattaacctcatcatctctctctcttccgaccaaacaaaactaaggcttaaaaggtttgttctttgtctgttacctttcacgaagataatacatctcctcatgtatggaaataacagtatccatcaaggtcttaacctgatactccatcatctacaaaaacaacatcaaagatccaacaacaactaggtttagtaaataaacttttaaaagctacaaactctctacactatcttctctcattttcacattcaaaaccagacaaaaccctagctcctagcttacatgctcaaatttcatcaaaccaaacacaaactaaaaaaaccacttacatcaacttgactcttcttagccacattggtccactccttagagtgaacaccagtcttccaatcaaaatcaatagtcaacgtggtctccggcttataatcaatggcagtgatgcacgctacgtaactcccattttcataagcagtaaacgagaactgaccagcctctacattatcggcttcgtgcaaattcttcccttgtggtggcatcacctacaataaccacaagataacacattaaaaacaaaaatctatcaagtgagatttgtgatgaaatctataccttgacgatgatcttgtgagaatcaggaagaggatgatgatcttcgttagggtttacgatgaagtatttaccaatagacatggcgttttcgtgaatctcctcaccgatgcatttcgttttcgaagactttaactcgtaacgcattgatagtgtcctgggagataacaacgcaatgatcaaaagcaaaatcgagcttcgacgaagatccatggcgtcaccggaaaagagaagagagagagagataaaatcttgcagtagtcaatgttttttttgccgtttcgggtaagacaaaagagtcaaagacgttctttgcacacgtgtaattattttattggtgaagacacgtgagcaagtcttctttgtcatgagcatagtatgggctttgtatatggaactgggcttagttttgtaatgaactttcacttggcacaatatttgggcttatatagattaatatatccgaaatttaaattttaaattttcaatataggtccggacattcagatttcatatcggattcagttcgaattttttttatttggataattcggatgaaaaagtttattaacattaggattatatgactattcggtttggtttcacttcggatggtgtcggatttgtatgggtttcaaatcagtttttgagaaaaaaaaactaaaaaattgttcaattttaatcaaaaatcgtttaattttactaaaatttggtttaattttgcaaaacaaagtaaaattataacaaatagaactaaaagaaatttggatattaaggttatagcgaatatttttgttatttagtattttttgggtataaattataactaaatattactaatattttaagatatataattttatttcggattacagatatccgtttgcttttcggttcggatcggattcagttcgggtaattcaggtaggagaattcattatctgttcggattttgtgactattcggttcggtttcggagccggatttttcggatcggtttttggatttcggattttatgtccaactatatatacatatatatatatatatatatatttttataagctacaaagatgatgatgatgatccaaaagagagataaagatgagatcaatctgttgggattttcaagtttttctaattttgaaaaataccatctttgcaaaaatttcgatagttttcgaataatcttatataaaagtaggtgtattataacaagacgattctcagcataaaaaaaaagtttatcccagacccgattaacctttaattttgacaaacgcgagttcatttgactgttgagttatttattaacagtttgatatgtaatcttttttattaaataataaatattttaaaaatttgtgtatatattaaaaagctgttaatatttaatccacaattcagtcaataatagaacaagtcttgaaacaataaaacaattattttacgttaaaaatgtaaaacattgtgggtttgttcctctaccaacatcatttaaaatgaaaccattttttaaactaaaacataactttatataatacggacgaagtatactttgtatcaatgtggttgtattagtttcttaaaatatttgtagacgttaaatccagtaatatccaaggaaaagctcatataaaactttaaattgtattttatccttaacttttggttgttttcaatattatcattcagaggaggggcttgtctctttgtttgtttttttgtttttcttcccaaaccttctcattttgtctctcaaactttgatgcaactcgggcttgtctctttatttataggggctttggtacaatcctaaaaatctgaattgataagttaacattaaaacaaacaaaaaagtttgatagttaaataattaatttgacgagtagaaaaatcctttttatcctttttatcattaaaacagaaaaatcctttttatcattatcatttttataaatattctaacttttctataattgtatattatcatatatttcatagattatttatttcatgacctatttaaatatatttccaaaagaaaaactatttaaaatattcttattttgtaagttttagtattataatttacaaatattctgacttattaatatatctatatattatcattttataaaaatgtaaataaaaattaaaatctgaaagataattaaaaaaagaaaaagacatgaacaaattaacccaaataaatttgtagaaaacccaatggtaaagacgataaccctgaaaacggccaaacaactcctatctctctgtcgacacaaaaggggatactgataaaaccgtttttcctctttggttttcgggccgccgacatttgccggtggttctattttgttacttgctttatttttcttctgctttcaataattgtgatggggaattttctgttatctcagattgttctcagatttattttcttcattcgatttctcttcacctttatggtgatgattgtaattctctttgtcgatgatatggttttcttgggacatctctcccacccttccgcagttatccccacactgaaacccatgattcgatgtgatgcagtcttgttcttgcagatttacaaatataaatggagatctcggaatttggtgtctttacaactatacaaacagatctactttggaaaatggaaactaccatggaaaaagagacaattcgggatgaatggataatgacaataagcaactatctatggaggagaatgatcggaagatggtttatgtcatgtacacaacaatgggttttaagcacaaccaagaccaatgacatctcattctatatgagagtctcgatcaatccaaaagctttgtgatgtaacatatggatcgttgcatatgactctcaactgcattaccggtattttatcagtaaaaagaagaagatccctaagcaagaaagtcacaccaaattgacggaaatgacgaagatgataaagtacttgactaagaatgcggcatgtattgcttcatcattttttcgttacaaaaacaattggttgtatttgtaatctcattgataatcatgtatactttgattcacattaataaagtttgtttagatgttaaaaaaaaaaatgtagaaaaccattaccagtttatcatgcatcaaacctaagattggtcatataccaactaaacaaagtgataaatgttattttctgtatggcaaccctacagttgtcttaaacttaagaaaattttgtttaggactaatacatttaatatttttaaagaatatcataaatatttaatagattaaaaaattaaaaaattgtaaatactctaatttgattatttaaaaatagatatataattaaaatatttatagcatgtgacatgttaaacgtaatgtattatatgcttgtttaaataaggtttgacacttctaaatattttaaaatttgatattgtaagcaaattttcattagaattctaaaatgaaaacatggattccatgcatgggttgaatttggtattattatataccaaacatatgttcatactatattggactatgtaaaattccgtaattatatgaaacaaacttctatttcaacaaccaaaaaagttaaaattcaaaaaagatctcctaaattaactaaaaaaaatagctaactaggacttattgctattgattccatgatccctatacttccttagttaatacattttagatatggttcatttataatatttagacttttgatatatgcaatcttattttgttgttgctattttttttttttcacttactattataatatatgaaaatttgattctggaatatataatatattaacaaaaaaaattttaacccatgttgtagcatgagtcataatctaatatgtatatatatatatgtatatatatatatatatatatatgaaaagaaaatctttatgttgagtcatggcaataataaatattgtttgacgttggtagattgtttttttaccgtctgatttccttatcttgtgctcatccaccgacttctcaaaaacaagaggaaccaaagactcatggattttaatgggagtacgaatctggagattgcgaattccaaaaagaaagaatgtacccaccgttaaatacatctttatgcaatttgtagcacacatagggaacaaaagagaatacgctgtcactaagtcacattggttgattttcatcttaaaaagttttatgagtctctagatacgctacatataggtaataaaagcataaaagttgcgactaaaaatttgtaagatacaccataatcatctctccaacaaaagatggcaagaataaccacaatatgaagatatgatgagacacaatccatgggatgtacaagttgcgcacactggcagggccggaatatctattcattgatgtcaaataaatttttacaaaaactgcaattttcttcttcatacacttgtagtatgcaattagtatatggcatccacaaaatactaaacatttataccctatttacttctgaaaactgaaatttctataatagattttttgagtaataacttgttttggaaagaaaaaaacataatactttatatatatttctaacattaaataatatacaattaatcttggatttattcatgatttacatgttagacccaatcttaacgcctaacaatttatggagaattagtgctaaataaatttacattaaatatccatatatatactacggttcagatattgtttaaaattcggattattttttgcatgtaataatttaaaataattataaatagcagaaaatagaaaattttcaaaatttattccaaaaatggccactataaaaaatattttcctcgttatttgttaaaatttgataggttagcattaaaacaaaaaaagtagttaaataattaatttgacgagtagtaagaatatttgatcaaaatgtatttaacatcttttaaacagaaaaaatcctttttcttattatcctttttataagtattctaacttttctataataaaaattatgtatattatcatatattcatagattatatttttcatgacctatttaaaaatatttccaaaagaaaaactgtataaaaatattattatttttgtaagttttagtattcttattcacaactattctgacttattaatatatatatatatatatatatatatatatatatatcaatatatcatgttataaaaaagtaaataaaaaataattagtgagcgaattaaaatcggaaagatattaaaatacaagacatgaacaaattaacccaaataaatttgtagaaaaccattaccggtttaccacgcaacaaacctaagattggtcatataccaactaaataaagtgaaaaacgttattttctgtatgcacgaccctacacttgtcttaaatttaagaaggttttgtttaggactaatacaatctccactttattgagtttaccaaaaatgaaggccactgagaacacaagaggagatgacaacatcaagatgtgctagaggtaaagccagcgcctcgagcaggacaattcagatggctaacaccaacaccaattacttcctgagctttatgtacggaaatgaatcagtatttgaggatcgtgtattcgcttctcgttaatccgactttaagttattggtttccaagctatatggttcaaaattatggaaggttacagttttcagtttgagtcaactcttaacaatttaggagagaatttgaaggccctgttctttttccagacgctgcgatcaaatccagcgaccaaaaaaacagttgtttaacacacaattacgttgaagtctatagaaagttatgtggagaggaatcactcgattctaaaaacagcgacctataaggcatatacacgtgttgccaaaaataacagcgactcaacatcttcactagagacgtcgccggcgtccatattgagcgactgtttttgtatctctgttaaaaaatttgtcttcgtcggagtcgttgtcgctgtcgcagcgattaataaacgaacatgcccgaagttacagagaacaacaccacacactatttgtaaaattatgaagcaaaaaacacataagctaatgaatactcaagtcttgtgaattacagagtacattgaaagaagctaacagaaccattgagaaagattcaaagtaatggacataatttgaaattttgaatggttaaacgcaaaacatttctaattcactcagctagggatatgtgatcatctactgaaacccacgtacttggtgcaaatcatcacttttgcagtcaattaccatctttctcatgtaaactttaaagcaactttcattcctcatcaactagattcttaattaccttaccaaaaaaaaaaaactagattcttaattacaccttcatgatctaacatattgaaacaaaaaactatatacaagctcatatgaaagtgtcttagcatgtcccaaagtacaaaacttctgcaattttcatctctcaaatctcaagtaccaagaacaaagaacatcaaaaagcttacattgttgttgttgatcatcatcttctttcacgatctcaagttacacattacatgatctaacgaaacatgtactcagcctaatcattgaaacagaaactatatacaaaactcatgtgaagtgtcttgacatgtcccaaatctcaagtaaaaagaacatcaaaaagaacgttgttgtttatcatcatcttctttcagcagacctaagacgaagttctaaaagccaatggttaaactgaccatcactaaccttcaacatctcagacaaaggcatcaaaatcccatgttccttaagcaatctatgccttggctttatcttcctctccaagctaaacgaaaaatactgagggaaacgtttcagctccttaacatctccacgcatctcctcaataaaaaactcaactttaggaactaaattgttatcaacactataagtcaacaacgccggagatctcacaaccatcttcgctacttcttctcttgtaaaccctaacccttcttcaagatactcaattttggggattagggttcgttccacattcgatacaagcaacaccgtgttccgtgacgtaatcgtgtcgcgacccacgaatcctagggttttgaggaacgttaatgcaggacgaagctgataatctacagatgaaattagcaatcgaggacaacgagagatcgatttaggtatgtcttgctctgaaattgaaatctcattggataagaagcgaagaactggtaagatttcagattcaggatcagaagttaacaaatctggaaacatgtcgaggatacgaccaacggcgggtcttgagagtccggtggaagagagtagagtctcgacggagacgacggaggagattggagcagaacggagagatgggtttactcggagagctttgtgaggatctacgttaaggtcttgaaggtaaataagcttctcccggaatagaatcccagtatctgaagtttctccggcgaaacatctaatcctcacggcggagaaacacggcggcggaaaaagagaacaccttgctatcatcatcgtcggtgaggtagaaaaaaaaagtttcaatctttaaagtgtggataaaacaatggaagaagggtaaaatggtaattctggtgtaacggtcagataaagattaaacgacgtagttttttggttgagagttgtttctgcttgttcttcttcttccaatgaggatccctattctcaagcggcttaatcataagaccggtttttgcgcagagtctgttaaccgcaatcatcttctctgtctctatctctacctctggttttcgattcttcgtttcgaagttttttttttttttccctttcttcttcaagaggtcctttttaagatctcgctcatggttagtatcagcttggcgtttgaatttgcctctttaggtaagtttccttttcttcttctctttccttatctcttcttaataagggttttcacaatctctctgttttcttcagaaaaagattgaatctttattgaaaacccaaagtgatgaaattgaaattcatgatctgggtattatagattgcagattctggaaacgtattatgttaatgattcatttcaagttttgattttttgtgttggattgaagagaagaatagtttattgatgttttgtgaagaagaagaagaagagattttgattttggtttaatatatagttggggattaacaggatgggaagggtaaaattgaagataaagaagttagagaacacaaatggacgccaatctacatttgctaaaaggaaaaatgggatcttgaaaaaggctaatgagctatctattctttgtgacattgatattgttcttcttatgttctctcctactggcaaggctgcaatatgttgcggtacacgaaggtaatctatctaatgtgtcttcctttgttttgtttgttgtcaacataatcattgtctctcttggattgtgttatctgaatgtattatgattgttcttcagtagcatggaagaggtgattgctaagttttctcaagtaacaccgcaggaaagaacgaaaaggtttggtgttttcttatcgatatgtttttgtttgtttctccggcaatggttggtcttgttttactcattggtttcatcttttttgaatacaggaagttcgagagtcttgaagtaagtttattttcacataatcaaatgaagtttttggttaattttgatccttgagaatctctgattttagatgtttctctttcgaaagctcagaacttgaagaaaactttccaaaagttggatcacgatgtaaatatacgcgaatttatagcctcaaggtatgtccggaaacagttttatatcaaaatctcttgcaagaaactctatatgaatattaacttcttttcttctctcttgtttgcttttggttctttggtttcagtaattcaacagtagaggtattggttttaagactctctttccatttctaacgtctatgacatttgccaaagcctaaatttatacaaaacaaccttttttcaggacttgagtactcaagcaaggattctgcaggctcggatttctgagatacatggaagattaaggtaaagatcttgctgaggatgatagttctttgttctcttgatgtctgtgctcttttttatacttgttagtgtcatgttctgcagttattggacggaaccagataagattaacaatgttgaacacttgggacagctcgaaatttcgattaggcaatcccttgatcaattgcgtgcacacaaggtatcttttgtttaaaacttttccatttcacttcatccgcgaaacaaaaaactaaaaactcttctgttgataggaacattttgggcagcagcaacaggcaatgcaaatagaaaacgcaaactttgttaaggattggtcaacatgctcggtaatttactcgaatgactcttctttagttctcatttgtaacaaaacaaattgtaaacccggctgtacaactttcagatgcaagatgggattcagattcctttagaacaacagcttcaatctatgtcatggattcttaatagcaacaccaccaacattgtcaccgaggaacacaattcaatcccgcagaggttagtgaaaactctcaccgagagaacttttctttcttttaatattgaatcatatcttaaaaccaaatctttgtctatcctcaaaagggaagtcgagtgctcagcgagttcttcattcgggagctatccaggctactttggaacagggaaatctcctgaaatgacaattccgggtcaagaaacaagctttcttgatgaactaaacaccggacagctgaaacaggacacaagctcgcagcagcagttcactaataataataatatcacagcatacaatcccaatcttcacaatgatatgaatcatcaccaaacgttgcctcctcctcctcttcctcttactcttccgcatgctcaggtgtatattccaatgaatcagagagagtatcatatgaatggattctttgaagcaccaccacctgattcttctgcttacaacgacaacaccaaccaaaccaggtttggttctagcagcagctccttgccttgctcaatctcaatgttcgacgaatacttgttttcccaggtaaccaaaacaaaactttctcagagattctaaatgggtttttgttttgtagactgatttgacaatttgttcttctttcttatagatgcagcagccgaactgagagagatttgatgaatgatgataaaacatctcactgaagaaactcaaaccaatattttttttcagaaacagcaagaaagctaaaactctgccgatttctgaattggttccaagaagaaaaaaaccagtggtaatccctggtagattgtgcaaccaaaccacacacaatacgtgttcatttattttttctatatcttcaatagatgtcacttaattcttttctatacataatttctcagtcagatgagattttttgaggttttccatatttctccggcgataaaagttagtagtgtctttggagggctgtcaaagtaacgccatgacagccaaaagatgagaaactctctcttccttcccttcccacaaactctagcctctgtatctattctttttcattctttcaatgtaaaacaaacaaacaaaacaatgtttactacatttttgtttttgtttttgtcttcaaagtactcttgtttattaagtgatttatacaaaagtttacaagttatgtaggatgaactaaggaagcttatgtttatgggttagagagactacattggatgattcttctaggattttgaatcaccaagaaccatcaacaaagccaacagtatctttcacacaagttactaatatcttcttaaatagttttactttgtaagaaccatttccttgagtgggtttacaatgggacggactaacttgcgtacaaagaccgttttttattcactattcataattttggtccgcagtttagtaaataggaaaaaatataaaaactctaggggaattggaaaactaaccaaaaaaaaatataattaagaaactagcataaaaaaaaaagcaatgatatcctctatattttatatattaattccaagtttaccccctctatctctttccgtctacctctctcttcccttctctctcccctctatctttttctctctctctctttctctctctttctttttttctccccctctctctttctcctcccaataaagttcctacacctacctcgttacttgttttttatttcaaattagagtctcttaattactttagggtgatatttgatttgggggtttcgaattacagagcgaggaacacaagttaggttcagggaattgactttcgttgttgcacttgatgatgaaatagggttccgttgttgcgcttggtgtattggtgatgaaattgagttccgttgttgcattttgagagatactattctattttgtaaatagtatactatttacgtataccttgttctatatacgttttaaaatgaattgtttgttttgattaaagatgttaagtgatttcattaatgttttagatttaaacccttgggttccctatatattatccctttagggtttagtatacttccatcaaaaaatattgtcaatttatatagaacgttatgttattcattgacaacactattcacatctaaattattttgtgtctattttcaaaaatttaagtcatgatatttgtagaaaactatacaactttttaatagatatatcatgaacttgaattaaattttttaagatcagataatatgagttacaattgaaaaggagtaaagaaaaaagaaagagaaaagagaatttctctcctaccacctatttctcttctcacctcaacaccaataataaagtcacgtcagctcacactaatcattctccttcttcgctgacgaagcgtaacaccaggacagtgatgtctttttactctccttgaaggttatttactacatttacaaatttatggtgttagttggttaattatttagtaaaaaagtgttatatctacaaatcacgcaaaactctattacggaccaacaaatagtttatttgaaagcaaaaaaacaaaacttggtccgtaacggattattgtccgtcttagaaatataatggtctactccgcaaacagatttgtccgtcttagcgacatattggtctagtctgcaaacggatttatccgctctgtctatttgttgcaaccttgtaagttttcaaagaggaaacacatatatatgttatggattcggtatgttattatatttcccggttctatttctcaaacacactctctcgtcttctccaataactaacttctccaaatcaaagccttcttcgagattttgcgcattcctcgttttctaattcgtaagtttctcttttgtgtgtgtttctaatcgaaacttttgtgtcaatttcaaatcggaaacctaattaatttgttcaattcgctgtgatgttaaaaacccctaattacgttaaatttggaattagggtttgtgtattagctctgtgttatcaatggagacacagccgcagcaaccacctcctcctccggtagctgagaagctgaatccaaaactggagaaggaactgaatctggagtcgttgaagacacgagccgttagcttggccaaagccattgctcgaatccttgaagatttcgacgcttatggtcgaaccaacactactcctaaatggttcatcatcatcgaatccagaatttgataatattttgatgtttatgaattttttgtaacaaggattgattttctttttgttttgaacaggcaggatattctagggcagtattcgatggtaaatctcgagctttttaacattgtggaagaagtaaagagagtttcaaatgcgtttgttgtgcttcctaagaacgtcaatgctatgaacgctgcaagtatggtctttttttagttgttttagttgatgagttaaatgaattgtgaatgtgatgaactggtttagcttagcatttatcagtgaatctgcagttttaccggttatgttgtcttcgaaattactaccggagatggaaactgatgacaatgccaagagagagcagttgcttcaaggtgttcagagtttgcctataccaatgcaaatcgaaaggcttaaggttagttttgtaatgtatttttgttgtgatttgtttgctggtttttgaaatggtatctgttattacaggcgaggatggatatgattgcagcagcttgtgaaaatgcagaaagagtattagctgatactcgtaaagcttacggatttggcactcgtcaaggcccgtctatgcttcctactatggataaaggtcaagctgcaaagattcaggagcaggagaaaatgctacgagatgctgtaaatgacggtaaaggtaagagggttttagaatttattgagtcatttgatagtgtacgaaactgcagttttctgttttgctgaattccttctcatgttcttttacaatggttgtttctaggaacacaactgcctccagaccagagacagataaccactgcacttccaccacatctggcagatgtgctaattatcaatgatgcaggtaacgatttcattgatctgtctggtagaagtaaacccaatgcttgaatcttctttattttgttactactaccaatggtattctcacgttgttaatggctccaaaaattctctttcattaggtaagattgcattacctgggcaatcaaacaacattaacaatcaaggaatgatgcaggttaaactagtttattctctctagttgtgatgattattacttttgttagtatcattgtctttcgaggttcatgtctttgtgtgtttttaggtttccgggactcaatttgtgggaagatcagctgcatctccatctggtcctaattttgataacacaacatctcccttaccatattccaattctcctcgcgctacgggtatggttaatgtgccttcgcctcagcatcaaatccagcaacaacagtttcaacagcagcagcaaaggtcaaaattaatgcagttgcctcaacatcagcagcagcaactacttgcacaacaacaacaacagctcaggcaatcttctatgcagggattgggtcaagtaggctttgacattttgcagacgtagcaattgactgttttttcctaccatactgctttattgagcaacatgctaattctttgtgtagagtcagataccagcacttcatgatatgcatgggcaagctcagcaaaagtttcagacggtaagataaatagaactacaacatagttaggggatagatgtgtgaagtgaaaaggatcagacactaccttggtcaattatttgtatcattatgcagtagttatggccataaatgaagatgactagacgtatttatacaagtttacatataccaagtgaatgattcatactcttgaaaagttatcctagatcttgggacttggcagaagcttttatataaaagtaactgtgacagttcgtagtttcaaacagtagaatcaaatgaaattatgaaacaagcttttgtcttttaagtgtgagttttatcttatttttcagtcacatgggcaacatcaaatgccatattcccagccaatgggcgcgcaccaacaattccaagctagacagctctcaggtggacatattcagcatagcatgtctcaaggacagctcaatccagcgatgaaccgtcacttaaaccagttttcaggtggagccaatagtgcattgtttacttctgcacaaggctccccaagtagccaaatggtcagtcacctctctttaacctcttgaattgatgattcgaaacaattactaatcatattttctacgtactttttcttttaattctagataccaaacatgtcatctatgcaatctcagacacttgttcctaggatgcaggttagctcaaaaactcctctactcattatgtttcccaaatctgaacgatgaacattgtcttaatctgatgatctctttggatttttatggttgtcagcaatttggagtttcgggtaccaatccccaaagaagccattcgtctcaaatgttgggtgaccagagtaagtaaacaaatctcttctaaaacatgttttcttacatcaaaatcgattccctgactatttcatttgtcctatctttacagtgtttaacaccagcggaatgatgcaaacacagcaaacacaaattcagcaatcgcaacagcagcagcagcagcaacaacaaggaggctatggaaatatgcagacgaatcagcagagtctacagcctaataacatgatgcagaatgctcaacaaaggcaccaaaatcctcaataaccccttttaaataatttgggcttgtaatgggccgatgcctgtattttgtagtaccaaaggcctggcccattctttaacattaatacactcaccagatttctctagttgtatggtactttcacactacactagtacactttgtttacttgtatcattgtatgaggttaaaaacgtgaagcagagattggacggtggaggattgttttcgttctgacatgtttattgagaattcgacacgtggcatcgacgtgaacatctcgacgccgttgatggggttatagagacaaaacgaagacgcgtttctgttgtacacgggactcgagagagcgacgtgtctatgaagtttacctgttttctgaactttaaacagagagctttaaaactgcgactcgaaagctattaaattttctgacaatttgttttgtttcttgtcaacttaattttatatactcattttttatgtacttatttagctcaacgactcgtttagttacctcaatcaaattttgaaatttagttaccatttcttttaaattttttgtttgcttttgttacaaatatgaaaaactagtttactttggtttttaggaatttgcgaaaaaatcactcaaaatcgcttatttttacaatttattgtgcacattcaaaaaatgcaaaataaatttataaaatttaaaataatacacaatataatttatttgtgcgattttgcatatgttataaacgttttcactataacatatatttgtattcaaaagttttaaagatataattgaactcatcatctcaaaggctttgatttgatatattattttctttaatataaatattcaatgcataattttctttaaattaattttatataaaataaatattttactatatattatatgaaataaatgctttattatagggaaaaaacccaaaacaaacctcaacttgttatgaataaagatggatgctcattataacgcccatcatctaaactcatcatctagatgtttctaaggttttaccctttccttgtaatcctatataaagaaccctttacctcaatggaataacacactcattttcttctatctctttctctgtttataacacgttatcaggacgctctaaaaggtagatatagagattcttacatttttttaagaaccatgtttacttatcgactcatggttcatagtatttattttctattattgaaacaaaacaatatgagccgatcgatgattatagtatagatcggtaaaagcatgttttcaatgattcaataaagaagagaatcatgcttatcatttgtttctataattactatcgcatgattcaatgattctacaaagaaaatcgttaaagaagataatcatgcttattaattgttaatttttgtgatttattattacaataatgaatatataaattaccaattttataattatataactaattttgtaactattcataacccggtggtaggtgatgcaaacatgtattaatgttttagcattccagttttgaatagttgcatctatattcaatatcattttataaatattatattgtctaaaatccatttatgattgatatgatatcccttatttaactcctttgattaaaacgttatacatatcttatcacttttagatattgacttttccatattaaatatttgatttccatatatttgattgtgttattattatttttactaaaaatgttgcaagataatttttctttttataagattccatatatctaaatctttgtgttattattatctaaaaatttttataagatttccatatatttgattgtgttattattatttttactaaaaacgttgcaagataatttttttttttataagattcttttctctaaatctttgtggtatctaaaaaaaaaaaaaaaaaaaaaacaaaaaaaattgttcatggttttgccctaattttgcacgaaatcattttacccaaatcttgcacgaattcatattagcctaaataaaagttttgtcaagatatatgtaaaatccagattttgcacaaaatagttttattctgattggttttacaatattgcattaaaattgtattagtatatcatacttgattattttatgaaataaattgattgataaataacttaatttaaaggtataatcacttatagaaattttcatgaatgactagtttaatgtatcttaagaagatatcatatttttgatggtcaaaattttttcaagaacttaaattatcaccaaaagttgagaaaataaatatggtaaaaaaaaataagaaattttgaaagaactattataaacttaaatcgagtgtttttcaaaggctaagaaaacagatgagttatcgatgataagtagtactcatattctgaagtgaatataagatcttacatagttagtcaaatttaatatcgtttatactagaatataaaaatttaattattatctcgttattgttttattagcatatgattgattattaaaatacatggaagtaattttgattataagatcttattaagggagtaactgataagcaatgaaaagtaaattaaaagttttgaaagaactagaagtttcaaaagaattaaaagtttcaagagtatatttggcttaaccggattggtcatcctggtttaatgatgatgtgaaagtattgagaattatgtggacattaggtgaaaaactagaagattctccctaatgatttatcaaatgttacttgctcagaaagcaatatgataatgtgatttttaccagtgtaagtaatttggactttatctattcgtaagtatatatacaaggagatgattatgggttgatcacccactatatgacatttagatacctaatggttataaaagatgcatcgattcaatggacgcattgactcgattgttgcatcgactagaaggtcatatttatccttgttataaacccgcaacatagagtttgcgagattactttcttgattaaagtacaagagtatttcagtgtttatttataataaccattattagatatccgttgggataagtgtttaacattttgaaattcatgttcatacacaaaatggtttagtaacatcgatacacatcaagccaatgaataattaatacttttccccattattattggttttgggtcagaaacctaatagttttcatctaaaagctttgaatgtgaaaagtgctccaccacagcacgcagagatgaaccctcaaaggaggataagaatacatgttggatatgaatgataactaagccatcctagaaggatttatataccgctcgttttgaagactatcatattatatagtcagctattccaacataagggggagaatgtatacagctggtgaaaaagataaatagaaatgaattatcaatgatcctcggagtaaagaatgtatattaagagtccaaaagataattcaattacagaatttagcgttgtaattgccagacgcatttgctgacccaaataaagtgatgaagtcacttataccagttgtaaattaaatgccccagaatataatgaatgtcctgtaaggaccaatttcaaactgctattgagtcttaagattgcatgaagcgtaatagaccttggttccaaatataaatatcctcgtaaaagtgaaggagcacaaaattaaaaatgaccaaattgaggaaataaatattttgataatctcttgaagagagtgaatgatctctaaaagagacatagacatgacaaatgaaacattcaagtacttgacaatgaagagatctagctagctatgtcatgtcaaaatataatggaatcaaaagcaaatcgacaaaaagaagttgatattatagacaaaaagaaggatcatgaaagaaagtctattgaaaagtgtacacaaagtaatgattagccaaaaatgaaaaagaagaaatagacatataattataatctctagtagagatatttggactagtagtctatgcacatgatgtgtaaaaccagtggaaaataaatgagtctttatgtgaaagaatagtgaaattaatgagattttcacaaagataagaaatgtattatgaagagatatattctcttgtggtggatgtaatatttttttaagtatctaaagtctggcaataagagacggaacactggatatgacatttatatgaaattcttgaaagatataatctctgaaggattaattatatgagaattatgttctctagaactctactcgatcgaataaaaagaaatatgtaacatgacatacaatcatataaatgtatatttacgttgagtttgtcaaaatatattgatcaaactaatatttgttttgaaaatcattaaaactcctacagagttatcataagtaatacgatgacaataatctatgataaaatatcactagataatgatatttataagtctatatgaaaaccatataatttttatcattaagattatggttattaattccaacgagatattgtatttgattgaaaatcatctcctgaagaagatgtttccgagggggagattgaatgatatgcgtggatgtaccctttttccttatcatagtttttatcccacatgatttttctatgacaaggtttttaacgagacattaaagaacacgcaaataatacacttgatgaatattaagaaattctatcaatcatccaaatgaatattatacactaatgatatttagagaaataaataagatggtcaagatgaatcatctaaaagattcatgagcagaagaatgacgttgtactttatccagaaatttgttcaagagaagatttggcagacttattctcaaatactgtttattctctgccacatcttctaatcatgcagagattttactaattcatgaatctagccgcgagtgtgtatggctaagatccatagttcaccatatacaagaagactgtggtatgtatgcagggaaaaagactccaacaattatgtatgaagacaatgcagcatgcatcgcacaactcaaagacggatacatcaaaggcgatagaacaaagcacatcctaccaaaattcttctacacacacgatctacaaaagagcggcgatgtacgagttctacagatccgttcgaatgataatctggctgacttattcaccaaggcgctacctactactactttcaagaagttagtctatcgtatcagattacgccgtctcaaagatctcgacgaatatactcataaggaggagtaattgtatgttgcactctttttcccttaaccatggtttttcccattgggttttcctggtaaggtttttaatgaggcagcatttcaaatactttacgagttatggtactataatggtcatcagggggagtgttatgaataaagatggatgcccattataagacccatcatctaagcccatcatctagatgtttctagggttttaccctttccttgtactcctatataaagaaccttttatctcaatggaataacacactcattttcttctatctctttctctgtttataacacaactaatttttatttggacgtttaatacccaattgtttttggttggaaggtaaatacacgaagtaataaaaccgtgcaatttaatacacaaacaattaatcgttgttattttcatactcacgatctcacaacaaaaataaaattctaattttacccttaccatctcaattaactattaattttttataatatgatattaattttataattttgaataaaaattaattttattaatattttagtttatggtctccaatttttattattattatattattttaaaatttaacataaaaattatagaaaatcaaaaatattttaaaatggccggtaaacattcttcgtagtgagaaactttcttttcgattgtatatccttcacgaatcaaactattttcggcaaaatctcaacctgaatctcatcgtatttctcaagatttatcaattcataaaaatggctaattttatttttagtagcaaaatagctaatctcaacccaaatctcaacgaattagattaatctttgattctaaattttttcaaagagaaaacgattctttgatattgcgacgatagaagaagattgtaaaaatgactattttaaaatatttttgattttctataatttttaagttaatgtttagaataatataataataataaaaattaaaattttagagaccataaactaaaatgttaataaaattaatttttattcaaaattataaaattaatatcatattaccaaaaaaataatagttaattgagatggtaaaggtaaaattggaattttatatttgttgtaagatcgtgagtatgaaaataacaacaattaattgtttgtgtattaaattgtacggttttattacttcgtgtatttaccttccaaccaaaaacaattagatattaaacgtccaaataaaaattagttgaggttttttttagattttttccctcaactatataccaattctgtactatataccaagcgccgaaataaatcaaactgaaccaaataatatacagtttctatctcaatttttttctttttttttatctatctcaagttcgtatgtaactaaatcgaaaacaaaattcaacccccaaaaaagtaaaagttagcaatgataatataatgatagcccatactgattacgtaaccctcaacacacgatcaattacaatttacaaatacttagtgtaatagtattagctaagaatgagattggccaaaattatactaaatgattaatgacaaagaaagtctccgggaagattctgacaaatggcttgaaaaataagaaaagaatctgacaaatgggggacgtgcaaattctcttgtctagctctctataatacttttgtcatgaagtaaatgcaaacagcaagcgagagagagaagtaacagcttcagaaatgaaacggacagatagataaaagagacaaagcagaagttgtgaaatgtctctttaagcttcaaatgttataatcgaatatggaatacagcttttgcattgtttcatttcatccaccgtcttttcatctataacatgacacatttattatcatagtacatggaattcttattaacttttacacgtgtttacgttttttcagaaatattaaatcatgatttttggtgttttttttttataaatatatgtttgtcaccatttttatgatatatttcaatatattttgtacatattaatctttatttgtttatcaaaattcatcttctcatgtgacttttctatgattacattctacacatgtaaacatgattagaaaaaatacatatacaaatatgaaacttagatttttaaactgataagtcagcagataataataaaaaagttattaacactaaaaaactactaaattctaaatcaaataaacccttcagcataaaataattcttagattgcaaaatttacatcctccacaagccaacaaagcaaggctaatcacactcatgatgttgaatatatatgaagaaatggcacttttgatatcattatggcaattatgtttccatcaaaaccattatacaacaaaaaaaaatttgtttttgttaaattatagaccataacatagtagatcatttttttaggcttttaatttttgattattaacaaccaataaaggttaacacttactaaagaaagtataaacaagtttgtcaccattaaatttatttctaagtggaatacttacaagctttttgcagttccgttgattatttatccttccttagaatgttcaataatcacatgggcattgatattattctccactacatttccattactcaaaagaagctgctcgggtttcaatttcaaattcaagttttagtattcaataatctttacataaaatgttcataatcacatgcacattggtattattatattttcatcttggagagatatttgttctcacctcaataattttcaattattcaaagtgagtttcaaagtcaacattatttgtgttctttaaaaagaaaagcataaatcacacaaaacagataaaattcatagtatggtaacaaaacacttatcaaacccattggttgatctacattacaattacaacttcataacataaaccaaaacgacccaaaaagaaaaacacataggcgggtggtgaaattcctcctctgcccctacccacttctgctttttaaaccacaagacagaagcttgaaaaaagaagataaaacaaaataaaaaagtgataaaacaaaggaacccattggtgaaacatagaggtcccttaagacacaccactctactactcaacacccacttactaaaaccctaatccttaacatgactaaaagagcccttataaaacaagctcttttctccattttaaccctcaagagtcaaagaagaagtttcaaggctctccacttaaaaaccctaaaaagccttaaaccctctctctttctctactctttcctcaaccaactactacacaaaccctaaaactatataaaaccgaacttgactcaattttaacggaattgacggccggtgaaggtttgtccaaaggaccaactagctggagcaatgttgttagagacgacggtacgaccatcactagcagtcaccttaaatgacaatgcttgaccgtttaagagattgttgctttgccagttctgtccccagtttcttgacatttgttgccaccttgttctagaacctttaaccgcaaccgaatgaacatctccagcaccaccaacattggtcaccaagacaaggttgaagtaagagtgaccgttgattgtgaatcttatacctcctcttctcatacacggaaccctacacatgaagcaaaaaaaaaaaaaaaaccatcagttaaataacagagtcatttaaataacgaaaccattaacaagttacgatgacccagatacgaaagtgaataaagattgaaacttttatcaacaaacagagcaattatgaagacccataacaagaaatttgacacctaatcaagaaactgcataaaagatcaagactttgtaacagtaaagactatagatttatgttttaccttctgtaggaaacagggacaacaccagctttgtactgagcaatgcgttgaaaaacaggctgagagagatcgaaatgatgaagcggagggttacaccaaccaccagcgttattgggaagagcgttgttaggaggacagaaattggtggctgtgacaatgatagcaccaggtaaacaccacgcgccgtcgctctgacacttgatctcaaaacaagccccgcagctaagaccgttgttgaacagagcagtgctcaacgccgccgtgttggtcccgtaaccttgactgtagaggttcccgtagccacaagctccacctagagacaacaacatcaacaagattgtaaatatcctagattttcgttttctctgagacattttagagaacaaagtgagaagcacatacccattgttcctgaagcatcacttccaccatagaaggtagcatgagcattgacccatccagcgtcatagccatgaacagagcacaccattgcagcaaaacaaaacagagcaattcccaaaagacccatcttacccctgcaatagaacaaatttcaaacaaaaattatacctttattggttattagaaagatagaagaaaaaaaacagtaaaagaaagactttgaaaggaagatgttatattacatgaacattctctttgagaaagtgcagagctttaatggaggagagtgagagaaaaaggaatgagaaggagaaagatagttttgctttgatgggagtgaagaaggttgatggttgaagtggaatttatagaatgttcatttactgctttaactgttttccctaccttttatttattttttactttttgatctttctttactttaaaaaaaaaaactctgcaaaaaaaaagttatatttagggtttcaatggtgaatttattattttgcagcaaaacatatgggcacaagcgcatgtactttgaaacatggttttaagaaaaagaaaaaagaaatggttattttggtagttattggagtatataaacccaaacatcattgaatgttttgttacatttgttggcttgttcacctgttcttacacgtttgacattaactttcatatttatttttatgattcgtttcataatttattgttacacatatatagaggtaaactttgatttttcaacaaaattttaaaatttcaaaaattttaggtttttatcaatggttaaatttcacaaaaagttggattcctgcaccaaagcaagaagaaaaaaaggtcggattcttttctttcttgtgatgatttctactactatattggaggtatttagaagaaaaaaagtaaagattttaaaatgtagctgcaaagttttgaaataatcacgagcatccctaaacaaatttggtagtgagctagagggagagagagaaagcacatgggagggtcgcaggcggttttgatggttaggaactttggaagcgtgtgacttttcttctgcaaccttttcttcctttagtatccaaatgggccatctctactttttagtctttaattaacatcacttattctaaataattttagtaatttatcggaggtcattattaaagttttaaatggttaccgcgtttcagttgggcaaaactttttatagaccggatcgtttttcatttatcattcacaaattataatccgtaatggtgtggatccaaaaaaataaaataaaacttttgcggacaaatcgtctttaaactaagtccacagcagtttattgtccgcttatgaaaatagtatgtactaaaccgatgaaagattagttcgtattaaccacaacatctattcaaaacctaagattatttatgttaacctaaatattatctctatagctaataagtgtatctataaaatacattcgtgtattattatgtgcatatctcggtgtagtatattccctccattccctcagtaagatgaattttttagaaatttcacattctttaagaaatattgtataaagacaattttatcctctaatatactttaaaaataataataaatatttatctaattatttagtaagggtaaaacaggaaaacagttttaaaatttgcattgaaaatataaaacttctatctttgagataatcattgagccaatcacattaccatgcatgctttgataatgtggtatagaaaacatatatataatcatgaataaagaattttgcttcttactatttagtagtattaattcagcagcatattatcaaaataaatgaagattcgaaaaatcagtctttaattctaaccggcaagtttgggactttgaattatagaataattgcaccacattgcataaagcatgcaaatgtattttaaaataatactaaacatatcttttccaacgctgcgtcacggttaacgagtatctactagtatgatttgttgtctggagcctagtcattaacaccgtgatttttggagaaaatcatgtttatatttttactttttctaaaccctaatcagaatcagattcactagctccaatgcggtcaaaacaattttactacggaaaaggtcatttctccatcttctcatcaataaaattaataaaatcttaaaagaaaattggctttctcaaaaactgtgaaagttcgtttgctcttatgtcttccttgcagtattttgcagagtcttcaattcccaaatttgttcttttgtcttaaaaaaaagttgtcttaatataagttgtcttaatatacaacccatgttttttctgacattatgtttttttttttactgttggttcgagtatgctttgactgtgttgctgtattaccacttttcatagtacttttcaaatatgatattagacctctaactttcaaaattttaaaatataaactagtaaattaaaataattacgaaaataaaatacatttcagtctaacgaccactaaccgttcaactacatttcaagatttccaaaggcagctttttggtattcctcttcttttgaggtaattgtctacaactttttaagagtttatctagaccgttgataatattaaatttaacggataggattgatacatgttgcacgagcacatatgattcgttgtctgcacaatgcaaataaattcgaaccaaaatcaaacaaaaaaaatccaaaaaaatcaaatattaaattttataacagaaagaaccaaatttgatggattcgtaccgaaatatttcagataatcaaaaatataaatatattttcaaaaatattagtgatttttaaactaaataattaaaaatagttgagaatatatataaaatagtaaaaatactctaaaatatcaaaaacagttgactgaaaatatccaaaaataaccgagatatccgaaaacatttcaaagcaaaataaccgaatggatactaaactttggaatccaaaaaaccgataatcgtatggatacgtaccaaaatagaatggataaccaaacgtccaaaactatctaaaattttgattattttttttgccaaattgtcacttgcaagtgctctgagtttagcataatttaggatttagtctctcttaataatgatgggtcaaattgataagaatataaactcggtagcagattatcaattttagaataacttcaagctaccgacaactatatgtaggtaactaaatccctcgagtgttttaagcctgaatcaggttcaataattggagaaaaggtcatctactaatcatgattaagcacatactatctatcacttttgtttcactcctcgtggaaaccgtagtggtcaaattataagaccactcattaaaaaaagaagtaatctaagttaatcaatgacaatcacataatacacgttatttttcgttatggcctacctctatatatcattgtgattatattttctcaagaaattgtatgccataatttgtttccaactaatcgcatcagtgtttctaattgagttcatatttatatttgtttgtcattaacatattagcctacatattagtaatatcaattataatgtgaatttcaccattacgtttacagtttgaacatgtttttttcttagactaagtacaaaatacaagtacaatgtttaaaataatcaacatctttattttattatttctcttaagttcatttttctaatccatccactaaaatttgctataattttttataattgtgcctcacgtaaaattaatttaatgtcgttatgttcttgtttaaacattactttggcatgtgcaattgtttttgctttcttacaaagttacaatcacgatatattgcatgattttataatcatcatattattgtataatattatgtatgtatacatggttacgaaaaacatagataagggacaagcttaaggtaggtatcacgagagatacgacgagactctaaggtcgtcttaagatatgattaaacttaaaatcaaaccatttaggttatctctttgtattataggctctaccattttttcttgataagatgcatatcttccctgtttgtaatatttaactacattcctagcggatgtgtttattaatattttcaggtttaatcgttttcggtgtatgtttatcccaagatcagtcaatgtcgagactgacttccttgcaaaaacaagatcagtcaactataaattataatttacccttttaatgattataacattcgaatcatattaattcattaacaaaaaataaaatattcgaatcatattccactaaatccgaaagtgacatggtaaccaaaaaatctaacgaaatcgaattatgctatttctttttgtgaacccgtccctagctagctctactcatagaacgattattaatctgatttgactcatagatgtcgattatatggttaacaaatcgtttcaattataatgctgctcttaattagtaccctttgttaattaattaattaatttatttatttacgttgacaattctactgtaatcaaattgaattaggaaaaaatatgaacaggaattaaatattttctaacaaactctatttagctatctcaaaagattcatagttggttacttcttaactcataaagacattttatttttatttttgataaagaactcatataaaacattgcttgttcgaaagatatctacattccaatttgagttgtttttatacaatgtactattttttatttttgtatgtaaatcctagctagcttattctttttttttgtttttgttaagtagttataacgcaggttggtggaggcttggagagaaaaccttgtaagtttacactaagaccacaaatggttatatttgttgagtttttttttcctcttgttgtaaacctaaaaataaattgaatgatcctaacaaggtctttgcaaaaaccttagagtaacattaacgtgaaacagatggagtatatatttgcaaaggttaaaattttatcttatttcaatatcttagagaaaaacagaacttttcttaccactaataaattctttatttctgttttcttaatatatatagaaaccaacagaaaattcatattttactgtaaaatcagaaaagctttataccaatcaatttacgtagaatttaaacccttaccgaaaatcccaaaaaactcatatagtatataattcaaaggcctttaaaactataaaatgtagaagtgtatagtttagttatttataatttatactaataaaaagagtaatggattgctaagacatgcatttttagtaattagtattcttattatggtaacatttcaacacgaataatgcagacgctgttggaaaaaagtaaattagccgacacctactcctaagagatgcctaattgcctactataacatgggtaaagcgatgtatgtcgagtaaaagctt

SEQ ID NO: 158 - DNA, 91318 bp, Arabidopsis thaliana
aagcttaaccaacaagaaagctaaaatccctggaatcagaaaaccccctaaaacgatgagattcgatgaggtcaaagtagcgagaagaggtaaatttcactgcagatttcaatgtcacaggtctaccatagaatccttgaaacacactataagcgattgatccaatagctaagagatagaagacggtgataacaacgatgaaaccgattagaattaagacctttgttttggtatcgatgtcatcatcgttgttgtgagtagcgaggtttgatcggtgatgagaaggaagacgtaagggtaaagtgtgatgaagacgctgagaggaaggaggaagcgaacggagagatctaggaagtgacgagagtgtgcgttgatgattcgttttgattctgataagattatccagagattcaatggaggaggagatagagatggagtcgccattgaagcgtaagttagtagaagaagaatcgaaaggttaatgacgatgaatttacttataacgataagtatcgatatgattatcaatcacttctctttatctataagataaaaaggacacattatttttttctaaaatatatagagagattaactgtgatgggtaagaaattaggtgttattaccagaacacgacagaaattttttaattactgttatattttcgtgtttttttattatccagcgtgcccctactaaacgttaccggaaaaaacgtaattacagggaatgccactgccacgtcagaatttgctgacgtggattaaatgaactcagccggctgagttacggtatgttgcggttgacttacgtcaaaaatatatgagtcataacaaaacggcgaagtataagtataactcagccagacgttacggctgagttgaaaaatgttgcctgagttatagtataactcagacaacggtatggttgagttaaggatgttcggccgagttataagaagttatacgataacccagccaacaatatggctgagttatgagaaaaaggctgacttatttcctcgacgcggccgagttatagttttgattggcttagttatggaaagatgtgacagctgagttatggtcgagtgatataaatcagccgccaatagctggattacgatataactcagccatgttatggctgacttatttttaaaagattaattactataatatcatgcagttatggccgagttgttgaacgttacggttgagttagttgagttacgacattacacggctgacttaactttattttttttccttttttaattactgtaatagtattcatgttgcgactgacgtatagatttgcttgatggctgagttatcaaatgttcgtttggtggcttagttgccacctcatcaattcaaaacgacgtcggctgtaatattccatgtcatcattccatgtgcatcatcaaaggataaaaaaatagggtaaaattttttcaactcgtcttcttcacttgagtttttcacatcaccggaacttctaattcctcatcgttttcctcatttttcttcaatttctttcatctttctcccgatatggttgatctagttttggtaattgttgtttccaggaattgggtatagaaacaaaaatacatatttaacactaatgaaagagggtgtaaacttgtgcagatagatgcgaaaacaacgcacgacaaatttgtgaagttggtgctcgatgataaagttagacaaaatgttgtatctcttattgtttcacgacaaatttacatgtcacggctgagttatatgcttaagggaagacgaaaggtttagtcaatttacatgtcacgactgagttatacgttccaagaaagacgaaaggttcgataaaattacattacagttgagttatatgcttaaggaagaacgaaacgttcagtcaatttacatgtcgcggctgagttatatgttccagggaagacgaaaggttcggtaaaattacattacgactgagttatatgtttaagggaagacatctataaatttacatgtcacggctgagttatatgttcaagggcaaacgaaagatgagtgtaaattatatgttacggctgagttatatgcttcagggaagacgaaaggttcggtaaattacatgtcacggctgagttatcatttaggaaagacgaatggttgtgtaaattatatgttacggctgagttacatcacgttacggctgagttacatcactttacggctgatttataatacagatcggaaagcaacatttttctggggaagacaatatgaaatttattggccaaataacaacaatcaaattaagaaacgtaataatctgtttgagggatacataggaggaagacgaaaccatatgaatcaaaacattgatagaagtagaaatatttctaaatagatcgattgagaggaaaactaaacgatagacatataaaatcaaagtaaaagagtagttattcttgattcaactaaaacctgtaacaaatcacataaaattccatagatctctttgatttgggtttcgatttttgatgacttgaaattcgacaccaccgaaagagtttcggccgaaagagacgagataagtagagaacggcgatgaaattagggttccgtcgactgaacgagagaagagagcgacagtttttttttttttttttttttttttttttttttgcgcggatgaacagtaagatgtgctgaaaaaatgagaaactgaaagttttaagggaatttttggtttcggatgacgtggattagggtaaatgacatgaactgatgacatggataatcactgtttttttatttattttttaattagaaacgaatttaataataatatttaattaaaactaatcaagggtattaagtgtaattacacaagtactgaaaacatacgaataaaaaaaaaagatgtgttctattataggaataaacatacaattgtgttctattctagtaattatttcaaatatgtatgatgtttatttattacttcttcactaaaatatggatgatatttatttattattttttcgctaattaatttattttctaactaagtaaactctattatatatagttcattttattcattcattcgtttataagttacaaagaaaagagaagagaaatagaaagcaataaaaaaacttttgttttgagttttactctctttagtttttattattcttttttattttaatcatttaaaacatgcttcaagatattgtatttcgggtaaggttgagtcgggtcaaatcggatcggatcaaacctataataattttttttgtgttctataaaaactttttggacctaattttttttcttgtactgactgattttgtattttcttatccgatataagatatttgattatttttatttttgtgatatttatcggaatttatatgttcaatgctgagaatatttatttgctttatatcatcaggcatttgagcaaaaaaaaaaatatacaaaatataattgagacatttgaccaaaaacaaatatatacataatttagacaatttagtgaactatgatatcattatgttgtttgttttttcttaaaactgtatccaaaaatatcatgaagagttgtagatacgataaaacttttataaacatatgtttaaaaaaatataattaagacaatttagtgaaatatgattatagtgacttgacttcatcactaattttttaattatatcaaaagattttggtattgtttcatgtgaagagttctaaacgtaataattaactactgctaaagatctgctaaagatacaagaaactataaacatcagatatattgcaatgaccaagcttaacatcaaattcgtgagtttgtgtgatgtttctttaaaatgattgtggcgtacgtatcgagttgccattttttacatgagacgtatagtctcaatatagattgatccaaaatttactattttttagtcttaattaacttagataagatattttaatggttatatgtcctctgttctaaacacaatctactaggcatcaatcaacattgttgtataagctacgtgtcttcaaggttgagtcagtgaggaatattttggctgaaaccaaatctggtttattgttatatttgacatgattttgaagtgttgtgtaataattttagtattgctctccgtaatctccaaatacatagtgtgatcatgtttactcactctagttctttgccattctcatgacctaattttttttattaccaatgactaacttagtgtgatcatgtttttactcactctatttctttttttgttaaaggggtttcttgcattagaattaaaagaaatcaaagtttacataggagccttaaaccatagacttaaaacagaacataagaagggaggaggcaagcacaaatgctagataaggagagaagaaattaagaattgccgagagaacgtatgcatccggttcccattccagttccaatgcgtttttgatcctccaaaagtgttgtttgccattatctcctttcatatttgtaatccacagatagtcatttccattgatcatactaatatcttcaagacatgacgcctgagaaagaatactaagtttgatgactcgaaacatctctgtgtgaagattataggcaagaaccatcttattttgagtgcgacaataaacccatccctttgcacatattgttccttcttcatctatgtgtaaatcatgatcataaggcgtataatctatcacctacctccatttcttgacctcaaagtcgaaaacctcgcatgatgagatgttgttacttttgtcatcatgtaaccaaactagtttgtacgttcctgtaacattgtctttaccaaatcctaggaaagggaacacctttggaagtggcatcttattgtccaaatactttagctgagtcatggaaagagggaggttttgagaccgtcgcatagatgggtttgtcacaataattggacttatcaaaatgtcgtggtccaagatgcagacaagcccgtcgcaactacccataactctgacacgttccttgaatcgatgttggatgtgatgaaccgggccttcttcgacagctctagtagaagaccactcaaacctcatagtcttcatatcaagactctcacactcgctttcatagattaagagaaatttgggttcttgggtttcctaataaagtcaaaatctctccttgaaagacttcgactctatcgtacacctccagtgtttagacacgctttgaaatccaattagggttttcacgggaagtctcaccattatttcttctaacacaatgttattgatgagtatcatctcaatatatatgatggatttgtctctgtcaaactacgaattacaaaccctaaatcctgcaagggtcacacctttttaccacgcaaaacaatgtcctgaatataaagtccaaataatatatttaagcccatcaattttattatcatatgatataattttatcatcatttccacgtatatgattgagtaaaaatgtaggaaaatccgttgagttcaaacaaaatattgttttaaggatcacccttttttatatattatcttgtaattttaaatattgtagtataagatagaaaatctatatacatttactgaataacgatagatcgtagagaattagatcgttcattactatgtgaaatagaagtagtagaagaagatggaagttcttgtgatgtcggcgaaacatttcttatctcttgtgcttcattgtccataaagacaaagtctactcgaccttgaggtgatatcagagtagtagcagcagcaataggaaggtttggttcctctgctgcttttcggaagctaagtttttcagaaacttttgaagctgaaaaggataaaagataaattaagagcagaactatacaaaggattatatatatgtaatgtgatatataataaaataaaacacaaagagaaggtaccgatatatgttaaccattcatgcaatattcttggaaccattttcacctttaagtttttatctaaattatgaatgtagagaagacgttgtataagaaaagtttggaacataagttaatgatataataatataatcatgcatggaatttaattctgatcatacccatgcacagcacgaaataataaacatgcgtataagtattaattttaattaaattaattaacatgttgattgtttaaaatttcatttacaattaatctgtttattaaatatgaatatatatatatatatatatatatcagctgaaagtactttgaagtttatattactactaaaatatttatagatttattttaaaatttataaataagaaaatcattaattttgaatataaaaatacgagagtgtagaaaccaatagtgtcattatcattctattagatattttgttctcaactagcaaatgaaaatattttgaacacaacaacaacaaaaaaaaaacagaacattatccaaattatgaacagagcagaggcagagcaagaagaagaattcagtgaatgggtagttgttatacaaacctcacccaaatccccacgtactgacgcatctacccctccaaactcaccgatattacaaccaagccaccgccgtgaaaatccaacgatcaacgacgatgatgaagattctgttgtcccctccaccgtgaatctttggcttccgtggcgagtgattgagactaccaagaagcgattaatcaagaactcagtgtgcatctttcaggccgtcgaaagggtgcgttgtagttacctaactcgtaaaagggtattttggtcattaacaatcattggaggcttctcgttggtcttgagccttgtttatgtgaagctcgtgagatggtggagacggctacatgaagagaaactgagatttctgcttcttctcctcagagagaaagatcaggtttgtgttaactaattctgagcttatagagctatagtaatcttaagaaagttttttttattggaaattatgtgattttgtagagaataaaggaacttatggttgaaattgggagattgaacgagttgttatcatcacgacgcagagttcgagtggttcgaatcgtgtaacgagacgagtgtatatatgtatgtattagaagagcatttgctatgtgttgtgtgattattatacagacatatatagtttcacgtgtatgtaagaagatatacaaatatcaaagagaaatagagtgggatacagtttatgcttgatgtattgttctgttttatatatgttgcttcatgtttgattaaaaaaactaaaatgttatgaagttttttgagtgtcaaaatgcataagatattgcatttggaacaatcaggtcacaagctcgaattccgagtcgatggagaaatacatgaaggttttttgagtgtcaaaatgcataagatattgcatttggcaataagacattatcttttgaagggagattaaaaatgattttttggtcatacacaacaccattaagttatgatgttctgttttgacactacctaaacgctctctgagagaccttgaagcttctgttacctttaaagtagagtcatttccaatagtcgcatgcaagattaaagttgattgtcagaggggaggcagaaaaaggagtattgggtctaagaggcaccgcaagaaggaatgcggtctttatatgctgatatgcatatgctctttgggtagcttggattcacaagttgttgtttaggagacgatccttttggcctaaaaaaccagaggttattaattagttatagatttggagatctctactttgcaccgtgatatgacaatgcaatttagcaaatgccactaaagagagttgtgaccagcatatttctaattttttttttttttggtcatgggaccaaatccttaggtatcgcgtgtaaaacataaacattttcattttatgaatacttacattcttaggaaggaaaacaaaaattctaagtgtgtagtttcattcaatcttgcagcctatcctcttaaggaagtttcgccatacattacgttaaagtatgtgaaaacaaagaaagcaagacttcactttggatgatgcaaaatgttagaaaacaacaaaaacatgatgcaaaatgttagaaaacaaatcttataaaatagtattacaaatttgctaaaattatatatatgggtgtcagggtgtgaaaacaattgtataaagtagggctgggcgttcggtttttcggttcggttttttcggttttacggtttttcggttttacggtttttcggttgtaagaaaagtgaaaccatataaaaaccatatgaaattcggtttggttacgggttggttttaacttttttttggttttagaaaaattaaaaccatttaaaaaccatatgtattttggttcggatcagttccggtatggttacgtttttttccggttttttcatgtttttaccaaaataacagcaattgtatagagttagtaagttacaataaaaccaatacatatgccaattggcaattaagggattatgagatctatttttagcaaaagtgccaattggcaattaagggattatggtttacgagtaaaggagacgaagaaaagggacgagatcacgttttttcttctttaaaagataaaaatagtttaatatggcaactcttagctgacgtaagtacgtcacccatggggccgtctttaatataaaaatagtgtaggaatttgtttttttctgtggaggcttatgatgatgtggaggcttatgatttatatgtgaatttcgtttttttctgaaatttttttttttattcattttctttcatagtctttttactattttagctaactacctatatttttcaggagtgattaattttgcaggttcttcgtgattatgcgatataattttgcattaattttgtaatcttatatttttatatatttatttttaattttacaattattttttctttaatagtatcaatatcgatctctccattaaaaacaaatttattactaatatcataaaaattctcaaacaataaataaatattaaaattaatactaaaaagttgttcttagtgaaaaatttatgtacatgcttttagtgatgacgttattggatctgctcgacgactacgctcgtatttgtaatttgtttaattattttaataaaaaaggagactattctccagattatttatttattttcgtgttttgtctccagattccgatggattcgtactatagtgtttttaatgcagacgtcatgttgcaaataagacactttttggtgtttaaataacagcgcatgtgttcaatttcataggtatctcccaagtccgaacgatgacattcttctctcccactcaggtgtttttgaactacaggggagaacaactgcgtcgcagcttcgtgagccacctcattgatgcctttgaaaggaatgagatcaacttcttcgtagacaaatacgaacagagaggcaaagacctcaaaaatctctttcttaggatccaagagtcgaagatcgcgcttgccatcttctcaaccaggtttgtactattctttcaaattattcagaagattcaagaaaattaatcatccttattttgatttcagatacacggagtcaagctggtgtatggatgagttggtgaagataaagaaacttgctgataaaagaaagctccatgtcattccaattttctacaaggtgaaggtagaagacgttcgaaaacagacaggtgagtttggtgacaacttctggacgctggcaaaggtttcaagtggtgatcagatcaagaaatggaaagaagccttggaatgtatccccaacaagatgggtttgtcgttgggagacaagaggtacttatccacttacattcactaaatcttcttcttctttttgtatagaataagttatatattctttttttggcagtgatgaagcagatttcatcaaggaagttgttaaggcggttcagtgtgttgtagcaacgattggacttgaggaagaagagaatcattttgggaaaaagaagagaaaggattgcaaatgtgagcttcctgatttgaagaaaagcagaaccaaaaagttgtgacgtaagaaaatgttttgcaatttgtatggatatggactctcctttctagttgtgttttttattgaagggacattaattttctctatgtgttgcttattaatttttaacatattcagattaatcaattaattaaggtcttatatcatcaccattctccgtttctcctgtaccacaaacattatattacaataaaaaacaaaatccaacttcctcatttgctttttttaagtttgtgttatatgttgctaaaatacaatctagtgtgaaatgatttgttacaatttcctcattttcttttttaagtttgtgttatatattcattattcactgacgacatccaaagttgaatccaacggtaatcaaaaagatagactacaatcttctgagcctctgtttttggatatgtgacttttagtgatcttttgtaaatcctaaaaagttaatactttagaatatttttctaatacttttgtttgtcgagtttggtcatcttgatttatttatgtttaaccacacttttgtcatatatgatgatgatgcgtcaatagactttgccgcataaagactttgccctgatgtcttatagtgagtgaagaagggtgggaataaaagtcttatagtgagtgatgtaaggagttttataaaagtgtttatttccacccgcataaaagtttgatagcgagtgatgtaaggagttttataaaattgttactcactatcaaaagtttttttttttttcttttaacatcactcgcacacttatccttttatagcattgcagttttatcactcgcacaacttgaaatgactaactgatttaattaatatagttagattttactaattaatggttataatgaaatttcaccattttgtttgattgtacggttcaaattcacaagaaatcgttttaaattacagttcaaatgttttatttctaattgttattttattacaatattgttaagagatcgatttaaacttatgttaatcgtgaaaatattatttttatttgtatatatatttactttcacgtacatatatgtatatatatatatatatatattaggtaaaacccgactaaataagcagatttaaaaaataattataaatttttaccgataatatttaaaatctaaataataatttcttttttaacaatattttactttatataataagatcgctgttatccggatcactaaaacttcaactaagtcgctttagaagtaggagttattccgttaaggctgcttttaaagaaggattgaagaatattagaaggattagattttgtaacactcagaactttgattctgcttttagtgaaaatctcatagatatgccaagaactctcgatcacaattcatagtcgagaagaaacttaaaatgatatttttctattttcttctttgcgagtgagcagcgagagagaatcaattcaaagagtacttcagtaaaatataaaatttgatcgtagattaattaacatacgatcttttattgtttgaggaattaaaatcgaaacatactcaagagaagtcataagaatgaaagatgagatatatagagagccaaatgaaccttttttgcataatggattatcaaactcacaaaatgtatggtttaagcttaacttttttgttaaagtcgggcataaagacaattgtgttggtgaaaaaacagttttttctctcgccatagacgatttctctaaagccaccggttcacagaaaaaccgatgtcaattccaaatcagacttgggtcacgcctttggggccattcgtggtttggttcatttctcatttttttgggatttcagtgattaatatgatagagtcatcccacatccgttgccactcccatcttataatgttgattcgatggaatcatgttgtctttcttcatagaaagtttgtttccggtgtgcttgttcattgccggtggaatttccgggtaatgtactcttacccaatggtatggagtttctacattggtttttgatcccgaaatcaatggaggaatcaatctacttgatggaatcagaattctagatcgaattgaatttcttatgacgctaacattgtctaaagatggtgatgtttactcattaccatggttggaatatttgctctcgtctattgattctatgggatgtggagtatatggttctaaaattaaggtggcaactttctttgaggatgatgatgttgactacttttcatggacggaagcctctctcttttaccggttggagattgttttgttcaattgaattgtctttggtataaacccaaagaagacacgagcgtgacgggaaggaagatggcctcaagtgaccgtgatagtgatgttctctctttctctgggttggaaaatttaactgcaatgaaaggagaaatcaagatcacaaataggcaacgatgcgttaggtgtttccagcatatcatatggagtttcaaaagacaagaagcagaatcatatcaagcaacaattcaggtttttcttttaactaaagtaatgcgaaaagtattttggagtttcatctatatggtgatagccaattacgagtatgtaaaggagggacgtaacagatttatctgttagcctgtaaggcttccgatcggcaagcatggtcaattccacttctttatcgaaattgttttcaatttcttttatttgtgtcaatggttgtatatgagtggtttatatatcttgtaaaactttttatgatgtaatagatttgattgccggaaaaaaaaaaaaaaaaaagcttaacttttattcattatgagacatgaactagagtatatggctgttgttcctggagcatatcaaggaaacttaaaagacagataactaccaacccaaaactcaaacacgaaattgagagacaccaaaaatcatcacaagaatttgctttctctttgccttaaataaaatatgaaatcagttgtatacccaaagctatatatatagctctctaatggtcttatgatcagcaaatgagtatgtgtgtgcatgtctactacttagatgagtttctttttctcaaagaaagttttcaagtgccagaattgtagaccagccaccgataaacaaaccacaagcgacccgaaactcaaccacgccatcttcgagtttgtggatctattcagttcttgcatttcctcttccctactcccacaaaaccaaaacacaataacaagtattaattaacctcatcatatatctctctctcttccgaccaaacaaaaactaaggcttaaaaggtttgttctttgtctgttacctttcacgaagataatacatctcctcatgtatggaaataacagtatccatcaaggtcttaacctgatactccatcatctacaaaaacaacatcaaagatccaacaacaactaggtttagtaaataaacttttaaaatccacaaactctctacactatcttctctcattttcacattcaaaaccagacaaaaccctagctcctagcttacatgctcaaatttcatcaaaccaaacacaaactaaaaaaaccacttacatcaacttgactcttcttagccacattggtccactccttagagtgaacaccagtcttccaatcaaaatcaatagtcaacgtggtctccggcttataatcaatggcagtgatgcacgctacgtaactcccattttcataagcagtaaacgagaactgaccagcctctaccttatcggcttcgtgcaaattcttcccttgtggtggcatcacctacaataaccacaagataacaaataatgttttaaaaaaaaatctatcaattgtgagatttgcgatgaaatctataccttgacgatgatcttgtgagaatcaggaagaggatgattatcttcgttagggtttacgatgaagtatttaccaatggacatggcgttttcgtgaatctcctctccgatacatttcgttttcgaagactttagttcgtaacgcattgatagtgtcctaggagataacaacgcaatgatcaaaagcaaaatcgagcttcgacaaagatccatggcgtcaccagaaaagagaagagagagagagaaagagataaaatcttgcagtagtcaatgtttttttgccgtttagggtaagacaaaagagagtcaaagacgttctttgcacacgtgtaattatttaattggtgaagacacgttgacaagtcttctttgtcatgagcatattatgggctttgtatatggaactgggcttagttttgtaatgaactttcacttggcacaatatttgggcttacatagattaatatatccgaaatttaaattttaaattttcaatataggtccgaacattcatatttcatatcggattaggttagaatttttttgtatttggataattcggatgaaaaagtttattaaccattcggattatatgactattcggatttgtatggatttcaaatcagtttttgagaaaaaaaaactaaaaaattgtttaattttaatcaaaaatcgtttaattttactaaaatttggtttaattttgcaaaacaaagtaaaattataacaaatagaactaaaagaaatttggatattaaggttatagcgaatatttttgttatttagtattttttgggtataaattataactaaatatcactaatattttaagatatataattttatttcggattacagatatccattcggttttcggttcggattgaattcagttcggggaatttgggtagaagaattcatcatctgtttgggttttgtgactattcggttcggtttcggaaccggattttttggatcggtttttagatttcggattttatgcccagccatatatatatttttttataagctacagagatgatgatgatgatgatccaaaagagagataaagatgagatcaatctgttgggattttcaagtttttctaattttgaaaaataccatctttgcaaaaatttcgattgttttcgaataatcttatataaaagtaggtgtatttcttaagaaaaattcaattttctcacgggaaaagaaacataaacatatagaaaaaaaacaaaacttcgtacggtcgtatctgtattttttgtccgcacttgtttcggtcactaatttcataatttcggagaaaaaaatccacaaaagtttcaaacttttggcaaattaagcggtttttgttaggttttaattattttttccgatgatgaagcggcgatgagtgtcgtcgtcggagatagatcggagagtactctgatgcggagtgactataaagctcctccgagtcaagctattcccaaagctcgattacaagtttggttctttagagtttgttcttgcattttggtttggacttgtttgattcagctcttttggcattcccaaatcttcactggtttaaccaatcacatttctagattctctctcccggttcagtcagttccattacctcctcctcttcctccaagttagttttgttgttttcttcattgggttttgttttggttattgagaatttgagagattgaaggaaagtttgaatttttttttttgcagggaattacacaagtaatggaattttactagtgtcctgtaatggcggtttgaatcaaatgcgtgcagcggttcgtgtaactctctctcatttgctgaatttagggttttgcaatatcttgatgcttgttttgtttcagatttgtgatatggtgactgttgctaggctattgaatttgactcttgttgttcctgagcttgataaaaaatcattctgggctgatacaaggtatatgtttgtgtctcatgtcaatgatcctacaagatttgtttgtagtttaaagcattcttttgtttcttccttttacagtgactttgaggacatttttgatataaagcatttcattgattcgttaagagatgaagttaggatcataaggagacttcctaaacggtatagtaagaagtatggattcaaattgttcgaaatgccgcctgtgagctggtccaacgacaaatattacttgcaacaggtttatttgcaagtttctttggtgttctgttttgcctctatgtgatgaatctgaaatgcttatgattgatcggatttttttgtttgtttcaggtattgccgcggtttagtaaacgtaaagttatacatttcgttcggagtgatacgcgattggcgaacaatggtctttctcttgaccttcaaaggctgagatgccgagtgaatttccaaggactgagattcactccacggattgaggctttgggatcaaagttagttcggattcttcaacaaagagggtcttttgtggctttgcatttgagatatgagatggacatgttggctttctctggttgcactcatggttgtaccgatgaagaagctgaagaactcaaaaagatgaggtgaaactattattttagctggatgctctcatcttttataaaattttgatttcatggttcacttctgtgttctaggtatgcatatccatggtggagagagaaagagatagtttcagaagaaaggagagtgcaaggactgtgtcctttgacaccggaggaggcggttttggttcttaaagcattggggtttcaaaaggatacacagatatacattgcagctggtgagatttttggtggtgcaaagagattagcccttctaaaggaatcatttccacgaattgtaagttttatcactttcaacattacgcactttggaaacgatttggtgatgatggtgacttgttggtttttcaggtgaaaaaggaaatgctattagatccaacagaattgcaacagtttcagaaccattcatctcaaatggcagctctagatttcatagtatctgtagccagcaacacttttattcctacctattatggaaacatggcaaaagttgtcgaaggtcatcggaggtattatgaaaatctgattcaagctaattcccagcaagattcttgaaatgaacatctttttgcaggtaccttgggtttaagaaaacaatcttgctagaccggaagagacttgtggagcttttagacttgcataacaacaaaacgctctcttgggatcagtttgcagtagctgtcaaggatgcccatcaaggacgacgaatgggagaaccaacacatcggaaagttatctccgttagaccgaaggaagaagattacttctatgccaatcctcaagaatgtatcagttaaaatgatatagatcactaaccactagagcaggatttgattagttcttgtttctttctttgtttatagacctttttcagtttctgtaaagtaagatgaagctaaaaagattgtgtcatcgttgtaccaagaattggtatgataataaaatcaggtttagttacattatcacatggttttcaagaagatgatttgctagctaaccaaaccgggaaacttgtatctatcaactggcctgagattttaagaaacttgcggctactagttggtgtactccgaggcactgagatactcgccatgctcctcaaagtattcgatcatacgtttgagaaacgcatcactgctcactgtctctgtatcgcagacgatacaacactgtcttctagagcgagtaacagccacattcattcgtctttggtcctttaagaatccaacttctttcttcgagtttgatcggaccatggaaatgatgatagcttctttttctcgaccttggaaaccatccactgtagagatctccatgtcctttagcttttcctctttgcccctcagaatcctaagcagcataacctgagcagcgtaaggcgtaataattccaatatcagaaggttgaactccactctccattagtcttttggcatgtgccattgcaacctctgcttcaccttcattataggtgctctcttcctcatctttcttctcttccatgtcacacccagcggtatccactaagagtagagtcgcctctgttgaagaagattttgttacattctccaagtcaaaaagcatgtgtgaggcaacacttgaatgcgctgttatcttgttgtcgtaaagctctttggatgaccagttcattataagctcatgcatacgatactggacagtaagcatggacttgatctcatctccataaagatccgctagtcgttcaaagagtgttctccctaatcctttcctttcagcttcagcactttggattgtaggtgggagttggagatggtctcctgcaagtatacatcttgaaccctttagcaaagctatccaacatgctacctcaagagcctgtgctccttcatcaatgatcaccaagtcaaaagttctattatcgagctttcgtgttaatgcaccagtcaaagttgtgagaattacatcagcattcttgatcacgtctgatacagctaattgctgccttttacgctcttccttgcccagagttcgaagctccttctggattagtctccttgtgtttttatctttcgctttcaacaacttcccgtttaaggccttcatttcctttctaatatcattcgctagaccgctgttatctccctttaggacctgagcatctagagcactatccagcacttgaggtaaaagccgtgcaggatgtcccaccctcaccagcttaactttatgtggaacaagtctctcaacaatattatcaactgcaatattcgaagctgcacaagcaagaatctttgaaccacgtttaacttcttgcaagactatttccaccaccgttgttgtcttcccagtaccaggaggaccatgtagcaaaaacacatcctttgaggataaagcctttgtaatcgcatctttctgcgattgatcaaggttcttgttaaaaggcgtaaaggacttaacatccttcttagacactgatggttgtctctcaccaaacaagacaggcactaaatcagaagcaggtcctcttaacacacctttactcagctgtatcaacgtatctttcatcctacgatacgtcacctcattcgcaagtttctccaacctaagagacgtgtttaacccttcttcaggtacctcatcaaacacaacagtaatcgaagaatcctttaaccggtaaacaactccttgcgcaagaggagacgaaccaagatcagatttgttgagtttcaaaacaacaacatcatggttaccaaacttgtgagcaggaagcacatctcctttgttggattgaaactcaataagagatttacccattagacctgtttgaacatcaacacatttcaaattgagaatcgttgtgcctttcttctgagcagtttcaatgttccttgaagcaccggaggttaaagacattgagatctcagcttctttctccatgtctataagtggagccattgttgacacaaaagcttcaagagacatcttcctcgccatttgcaagcgttaatttctctgaaagtgaaaatacatgatttcaattgtaatgagtttagtacacatttgagcgatactatacaaaacaacaactattgagattctaaattacgaaaccgaagcgaaactcagaggaatccgaattgatattaatctagccggagagataaatgatgtcgtaatgattctacttaccagaagaaggatttgttcttctcggttgagattgaaagatgaagaacaaaaccctagaaatcaccgacgaggaagacgaagtgagaaatggttgtggaaattggaagatgaagaagaactcaagaagatggtaacgagcacacgcatttgtctctcaaactcttctcaagcgttacgttataatgggcttagattttatcatataattgggctttaacgtttcgtttaggcccattttaaatgttttttttcttcatatatgtccctattttaaatgttttttttcttcatatatgtcagttttggatcagttttggtgtccatttaatttcagcaaaataaacttgtgcaagacatttcttttaccaaaataaaagttggaattttatatcattttaatttttgacagagattactagaaactgattaaagtacgctacagaaaaataaaaacaacattgctactcaaaatattttgaatcaattttgagcgaatatggctaagttgcgataagaaacactgattccgaaatcacaaagcccgagaatttgcgtggttaccacaatattgaagcactacaatcatcatcgttgttgccacgagcatatctattcgaaatcagtcctcaacacctcgtcatagaaaccatatcatataagacgtggtcatcgtttttgcatgttgccaagacatgcaaacttgtttcctttttccgaacaagaaaacatattatataaaacgtacaaaaattaatttgatcgtatataagttttttgcgggttgtacattatatatttatatttactcataattagtagaaaagagtacatttggttgccaacgaaaacatacttttttctcttttctactaataataatgaaagtacaacttttctctgcttgacttgtccacaatggccaatgggtagtgttgtactaaataatattgtgaagactttgttagaatgataaacggcataatgtatagagatggattcaaaactcgaatatttcaattgttttctattgaaagtgtagactagcctttgcaatatataatatacacatctacaaagactgcaggttacagcgacacataacattgattaatgacttggtaaacgtactaacatctaattcaaattgagacattttaacaatcatgtggttttaatattaaaatggatactaagaaaagatatatagattgaaacttcgattaatatatcattgatcatttctttccacattatcggtaatatctctctactcatatgctctattgatattgcatcattcgagcgacaaatttacaagtggctcaatttcttgtgaaataatgttttatactaatatttaatgtacaaaataagataacctttcacaaaaataacgaccatgtcgtattgtccagctaacaatttatttttaaactaaattcctatacgattaattggtcataagtcattacacttgcttctgtttctgtatatataaacttcctttttgtatttctttcggacacaacaaagaaagaggaagatgaagtttggtaaagaattgtcgtcacaaatggtacaagagtggcaacaagcttacgtaaactacgattatctcaaaacccttctcaaagaaatcatcaaactcaaagaaaaaaccaaccctcctccacctccacatcatgccgtccccggtgaaggaattagtcggaaaatgactctataccgagcatttagcggtcttgtccaaacgccgggaaagaaaagacaaagctctcgtcaatccaactattcttcggaaatagacatagaagaaggtaatctcaagtttcatatagttttttaacttaatactaaaatggtaatgagtgcattagtccatgtttttaatgtatttatgtaagtttgtttgcatttcctatgtgggattcctaataggtaaagctccaatacttgttagcaaatcgactcatggattagagacaacatttctaatgacggcagaggaaggaggagagtatgaattggtatttttccggcgactcgacgatgagtttaatagagttgaaaaattctataaagagaaagttgaagaagtaatgaaggatgcaattatgcttaataagcaaatggatgctcttattgcgtttagggttaaggtggagaatcctgttgggtggggatgggaggaacggacggtggagatgactcgtttggcctccgatatcgcgacttcgactgcggctatcgctgcttctacacccgccagaacccgaaccagtaagacaattaaagcagttaattctgtattttaacatacataactaaaacagttgcaacttgagattctccctaacactacatatttacaatttgaatagatcaaacttgactttaatttatgtgacaacaattagtctccgtcaatttatgaccgtttctaatgtttctttttaaatattttttcttcaaaaatcagtttttaaatcacatttaaattactaaccataaatactctctatggatgttcaagaaaacgatgtgttaagcagcgtctaaaatgtctaatttgatttaagcgattttagacgatttaagcgtttttaacataaatcttataaatataagatcatacataaaaatatctattagagaaataaaaatattaagtcttaaacaaaaattagatcaaagatttatttagtttataccaaccaatagaaactaaatagagctatgtgtatggacataaaacttagttcgaaactgaaaaaattatattaaaacgaaattttaagcgagtttaagatgtcaagacgattgtttaggtgtcgtttgagtgtttagcatttagtcggggtctatacagttgtttttttttttgtaatttggttttaattagagttcaaaagagtcattcttgtagaatattgtttacataagtgatgtgatacggttcggaacgtattttccgtgccgaattattcgcttttatatttgcgcaatgaaaattaaagatgaagaaaaatttgtgaactcatttttcacaatcgtagacggcttttaagtataaacttctttttcagtaaaaatgatatactaaaaagaaaaaattgatctcactaaaaaattccggtttataaaagctatcatcgtaaccggatcgccaatttgaaattgatgaatttatatatctcccgcgcgtttggttacagtgaatcctcgagctcaagctcacatggaggcaattcaagaaggaagcttcagcagagaaaacgaagacgaagatcacggctccgtccgcggagcaaccggcgacgtgaaaacgagcagcttgaacacgatgagaggtgcgaggccagcaccaatcgaagttctagatcacattaagatcaacaacactaaagcaacacctagatccaccattaaaggcgttctcaattcctcaagccaaaacgagatcatattcaatagacagaatctaaacgaagtcgaagagaaactcaaattcgccttcgtcgagttttaccagaagcttcgtctcctcaaaagctacagttttttgaacgtgttggcgttttcgaagatattgaagaagtatgataaggtaaagatttggtttaaagtttgagatttttgattttgaggttgttttgaagtatgactgaaaggtgttcgatgaaatgccaaacacagataacttcgagaaatgcttcaaagtcttacatgaaaatggttgataattcgtaccttggaagctctgatgaggtaaacttgactagtttagtaactccattgattcctctgttttggactcctctgtttttgacctgctcctatattgcagcttatgaaactcatacaacgtgttgaatccacattcataaagcattttgcgaatggtcatagaagaaagggaatgaacattttacgacctcagatgaaaagagagaaacaccgagttacattctccaccggtagaatcatattatattcagtatgttggttaatgttttgctagtgcttttggtgtttatgaggaatttgggtttcagggttctctgctggttgtatattttctcttatcgtggctcttgttgccatcatacgcacccggaaaaccatgccggaggcagagcataatacttacatgaatactatgttccctctctataggtaaagcttagtttgcctcttgtacaaatcttattttgaggtgaatcttttgtttagacgcactctctctgccttctctgttgtttctgcagcttgttcgggttcatcgtgcttcacataactatgtatgctattgatatatactattggaagcgttatcgagtaaattatgccttcatatttgggtgcaagcaaggaactgaacttggttacagacaagttctatttcttggattcaccattggaacgtttgcgttgctttgtgttcttggaaatcttgatatggaagtaaaccccaaaaccaaaaatttcaaaccattaaccgaacttcttcctcttttccttcttgttgtaagtttcgtaaatccaaatatttaagcttttttttgtgccaactcagctatatgatggcactaactctatatgatgtttgttttaggctctgtttgtagttttaatcatgccattccattttctctaccgctcaactcggttcttcttcctcacatgtctgttacactgtcttgctgctcctctttacaaggtaaaagacttaaatttagcggcttatcaatgttgataatcttgtatggttactaatgctttctcaatgtaggtaacgttacccgatttcttcttaggagatcaattaactagccaagtacaagctcttcgaagcatcaacttctacatatgctactatggttggggagacttcaaaaaaagacaaaacacctgcgaagcctcagaaatctacatatattccttatacattgttgcatcactcccatatctttcccgtcttcttcaggtactaaagtttcttcaaaagacacatacatctctagagcaattcgataatattatctctgttgttcaattggtgcagtgcatgcgacggatgattgaggaaagaagccttgatcaaggatacaacggagtcaagtacttgttgacagtcatagctgtttctttaagaacagcctatggttatgaagtaaaaaacacgaagaatcctacatcacaccttaaagtgttagctggttcttcctcgattcttgctgctgttttctgtacatactgggactttgttcatgattggggacttctgaacaaaacatctaaaaaccgatggcttcgggataaacttctcatcccacagaaaaaagtatacttcatcgcaatggtaagccgcatttaaaacatcttcgattatataatctccaaaccatagaaaaaacaactgaattcttgaaaactaaacttcagatcttgaacgttgtgttgagattcgcgtggttgcaaacgatactgaacttcgaattcgagttcttgcacaagcagacaacgcttgcggttgtggctagtcttgagattatgcgccgtgggatgtggaatttcttcaggtttacttactatacacattgttactttggtttcttattcaccgttttttctatcatgggtttttgaaagtcttctttataaaaacagggtagagaatgagcatttgaataatgttgggaagttccgagctttcaaatcagttccattaccgttcaactacgacgaagacgatgaaaaggacgactaaatgttggcagaagaacgttttaactttttcttatacatgtgaacataaaaatgaagtttgtaacaaattgttagcgtctagtgtttacacaaaaccaatagaaatgtgaacactttgactaaccagtacaatgcagtgtataccgattttctatggtaagtaggccttcgtgatattccaatgagctcaagtcattactataatcggctttagatgtaaagccgcatataaagggggcgtctcaaacgtgtctgacgaatcgacggaagtgagttaagtgactaaggaataaaataaccgtcgatgttaataaaaagtcacgatgaaaatatttaaacaaaaagttgcgataaaaagacaataaccagaaaacaaacttcaatattaacggaaagttacgatgaaaactgaaaagatacgaacaaaaaaggaactgccaatattttcacagaaaattgcaatataggaaagttgcaataaaaaacattagcgaggaaaaataaccgtcaatatttttacgaaaagttgtgataaaaagatactaacggaaaaaataactgttaatgttgacgaaaagttacaatgaaaatataaaaacaaaaagttgcaataaaaatacactaacgaaaaaataaccgtcaatgttaacggaaagttacgatgaaacgacatgaacgaaaataataatcgtcaatatttttacggtaagttgcgattaaaaacacaaacgttcagagtaaaaaacatttcttgatattgttattattagtaaattattcttttttttatattaacatttaatatggtagtgtattctttaatatgaaatattatttgttacaataatttgtggacgaaatcaaattttaaaacaccttataaaacttgctaaacctaatcacactttttaaaagtgcctaataacacttcataatatacttaaaacagtgaaaacattgtctttcagatgataaactcttttaaaagtagtaaacctaatagcactttctaaaggtacacaaacctaataacaatacttcgtaaaagtacctaaaacaccaaaaatataattaataaagtgtttatcaactggttttgctcagaatggtttatactttatactctatagagtgcttcaaattttcgattcaagtctttcaaaatgtcattgtataatagtttgttgtgaatacatcgtacttagacataacttccatcgttacggaaccaaaccacgttttagtttgattttggtaaaacaattattcgcaaattggacttgaatcatcttgatatagtcattgacttagcactaaaagagtttcagtatgtctggtcaattcaacattttgacacaatctataaatatgtatatcacacactgacgaatgttcacaaacaactcttatctattttaaataaattaaaaacagagaaacaaaaatgaaatttggaaaagatttttcgtcagagtggcaacaagcttacgtggattacaagtatctcaaaacccttgtcaaagacatcaaccgcttcaaacgcaaaaccaatcttcacggcggtcagataagcctttcgtcgacggtgctcgagattgaggatggaataacgacggcgactattcaggttagttctacggcgagtcaacggtacgagacaacgtttctgatgacggctgagaaaggaggagagtatgaattggtgttttttcggcgactagacgatgaattcaacaaggtggagaaattctatagagagaaagtggatgaggtggtgaaagaagcggcggtgcttaacaaacagatggatgctttgatcgcatttcggttaaagatgaaggaagagagtacagtggagatggctcgctttgccttgcatggagtggtttctccggcggagctcgccaaaaatccatctagtaagcgaaatatgaaatattttaaccttttaccaaaaaattatatcaaatatttgatagaaataaagcgaaaatttgataatctaaaagccctgaaataacatatgataataataataaagatatcatcaaaatctcctaaagatatcactttttatgattttcatgtattcatttgtgtttgaaattcgagacaaatatttgacaaaaaatgtttttttgcgaataatgtaaatattcattgaaattgaaattgtttagactttacatgattgaataacctatgaattttgtcacttggcaaaaaaagatgaaaaacatggaagcaaaatcaaattttaggtgtaaaactctctattagaaaaacagaaaaatatcaaattttaatatttagtccattgaagcaatgaagctcacaatatcagctgaagtgataaacgatctaaaagttagaatatgaatcctccaggacgagaagaaaataattcttgtaacatcacaaaatataaatgaaaacgaattgatactaaaagttttatttccaagttctagcttgtccacctctatcaaaagctgattaaacacacatagtaaagccatatttttttatagttatattcaaatgaacagtaacaatatatatcaaactcgccaaattttaaaattgaccttttttgtcttctggtgttaattgtagtgaaagttcatatggaggccatagaggaaggaggttccagtagagctggtagaagatccgatgaagatgactattacacagacgaagaagatcacaatgatgtattcttcacaccagccaataacttgagcaagatgaaatcttcaagctcggcttttatcgaggttttagatagcatcaagatcaacaacacaaaggaagctcttcagtccaacactaaaagcgttctcaaagtatcgaaccatacagagctcaaattcagcagagataatctaaggaaaatcgaggagaagctaatatgcgcatttgtcgagttccataggaagctttggtatctcaagagctataggtgcatgcgtatcttttttattctccgacttgagataaattaaagaatttttttttttttggatttgagttttgaattatcaaaaatatatgcagcttcttgaatgtgttggcgctttcgaagatattgacgaagtatgataaggttagatggttagagaatatatatttttatttcattgtcttttgtataaggttggttttcataagtgaaaatgtattctatcagataacttcgagggatgctgctaagtcttacatgaaaatggttgataaatcttgccttggaagctctgatgaggtaagctaattagtttaaatgttgtaaataattttatagaggaaaatatatatgttacttactcgactatatgagatatgaaatataaacaacattcgatgagatttgatgaaaacacattttatcttctaaaattcaacagtgataattgttgagtcaacccaaattactataatatcaacttattaaccagtttcatagcgtttctgtttattctaatattgataatctattgctcctcttttgtcataggttatgaaactgatggagaatgttgaagctacattcataaagcagttcacgaatggtaacagaacgaaaggaatgaacatcttgcgaccaaaacctaaaagagagagacaccgactaacattttccacaggtataaatcttactctcttaggtacttttttgctctttcatgctttgcttcttaatgttttacacattcttatgagaaatgatgtttcaggtttcttgggtggatgcatgttttctctcatagtggctcttgtggctatcgtgcgcacccgaaacattttacaagatgatggccaaaaacaatacatgaatacgatgttccctctttataggtaggccttattatgcttcaatcatatatatgcagggccggcccaataaattattggaccctgtgctatgctccaaatttctttacctaaaactctaaatatttaaaaactagatcctattttgcaattatttgaacatttggaccctaaaatataaagaaaaactgaataaagaagtgggacccggtgcactagcacactcagcacctcccaagagccgggcatgtatatatgtttgcgtttacacttagtacgtattctttcttaatgaattcaccactttaaacatgttaaacacatcagatttgttaaaagtatagtaaaagttaaacacaattgaaaagttctcttttctcgtttttttcactcatctaaacgcaaacgcagaaattacatttgaaataatccacactttacttggctaatgtttgtttggtttttttatttgttcttgcagcttgttcgggtttattatgttacacatgactatgtatgctgctaatatttatttttggaggcagtatcgagtaaattattccttcatatttggtttcaaacaaggaactgaacttggctacaaacaagttctctttgtgggattcagcattggcgcgcttgctcttctttgtgttcttgccaatcttgacatggaaacagaccccaaaaccaaagattaccaagcattaaccgaacttcttcctcttttcctcctcattgtaagtccacaaatccaatatcagctcttgaatgcaaaatacttatagtgattccacgataatgcatgacatcataactttgtgatgtaaataattaggctatgttcgtagttctagtcgtaccattcaacatcttctatcgatcgagtcgcttcttcttcctcactaccttatttcatatgcttgctgctcctctttacaaggtaaatcgtcaaaactcaattgaatcgtaaatgaacatgaaatatttttacaaacatattactattgctttcttcatgcaggtgacattacccgatttcttcttggcagatcagttatgtagccaagcgcaaactcttcgaagcatcgagttctacatatgttactatggttggggagatttcaaacaaagaaaaaacacttgtaaagattcacaagtcttcaatactttcctattcattgtttctgctttcccatttttttctcgcttccttcaggtacaatatattgatctctactaactcaataattataatttggttgttcaataaaaaaagaatttctgacattttatgtgtagtgtatgaggcggatgcttgaagagaaaaacatagaacaagggtataacggtttcaagtacattgtgatagtagttgctgtttgcttagggatggcttatgaagtggatgacgaaaaagatcgtcaaattatttggagattgttaggtggtattacctcggctatggcagtggttttctgtacatattgggacttggtttatgattggggacttcttaaccgaacatccaagaatccatggttacgcgataatcttctcatcccacacaaggaagtatacgtccttgcaatggtgagtgataatattagtacgattttgcgatggaccacctggcatgggtgtggtcggtgcttagccaagtcttggtatcacctcgttctgcttagaccacaacaccctagctaggcagtaagtactagtttaaaaaagttttaagaaaagtaactgatatttaaactaaacgtagatcttaaacgtggtgctgagatttgcgtggatgcaaactgtgttagatttcaaattcgagtctatacacacacaaacagtggtcgcagtcgtggcaagtcttgagattattcgtcgtggaatatggaatttcttcaggttactactacgtactatacattaaatgactcgtttttcttaatgatactatattcgagacttttcaatcgcatttaataaaactaatcatggtacgtaaaaaacaggttagagaacgaacatttaaacaatgtcggtaagtacagagctttcaaggcggtttcattaccattcaactacgaagtggaccattaaatgttcgttgaatagagattgtagccatccttgcttgctcttcgtcgttatctaatcagctttagctgataatgatattatcccatgtatatatgacaaggacaatagtcaagtctactgtctcacaaatggtcaacaaaattcaaccattctatatttgtagtcgtgttaataatttaatatttgtttgttcgtaatattcatataatttttctccttctttttctgcaccatacactttactttttctctttgtcgtcgtgtactgaaataactttttatcttctttcttttcggttcttttatatcatgtacttgaaaagagaatcccaaagtcatataataatactacaaaaaaaaagagacgtgtaaagttgagattcacaaggtacggaattatctttaacatgattaaagtgttagggcatcattattgatagtatcctatccaaaattttagggtaagatttgtgaagaaagagctcttatataaaagtttttatgcttatatttaagttttttttcacaaattttaagctaagatttggttaagataccactaataatggtggtcttacagattcaatttttttttttattccttgcgttaaaagtgtaaatcaattattggacaaagaaggtggtaataaattaatgggttcatgaaaatcatgcttgtattgaaatagttttcaaatagttattgttaggtcctttgatacaatgaaggctgatatatataaacgaataatcatattcaatataatttcctttcaaactttgtatatacttttttttgtatataattttttcataagcatagaaattagaaaactttaaatgaattcactttactttgtatacatctttacgaaaacaaattacataaataattagaaacaacgaaaaaaacaaaacgtttttggggtcaactttattcgttaactgagtcaattcttttgttctttttatctattataaaaaattcacatactttataaaaacttaaaatatatggttttaaatatccgagtatgttggattgttaggtatgggatccaatatcactgagtcttttaaagtcgaaatctttgtcaatatggggtttttgtagtgggtcagttggttcgccggagtggtaacgaggaaggaaactggaaacttctctccttatttatcgttttatggtggttcaacgcaaaatcatggttcctatttctaccggtagagttgataggaggttctgctttaggtcaagttctgctttgttgaattctagataagtcgaaaatgtagatatctaatagaacacgagttcgatcgttggaagggaataatttattaaatactggtctcaactctacaaaatatataatctaggcccgaaattttcttactagtaaaaatatatttaataacaaaggtttcatgtcacatattccaaatcaaagttgatggctatgttggcgttgaatctaaaaagacactagagaactagacttgtcaacaagacaataagagttgcgatttagcatatataaccaacaatgtgacaatcctactatattatttgggaagtacattttaaatataatcttaatttttgtaattaattacatgacaatgccattagaaaaatttaatcaaaaacaaaattttttaatgacatcattaagattaccaaaattatttaacgacaatattcatctcttaattatagggcttattagatttaaagacgggtcatcaaagatttcctaaactgaagcaaaatatactgaatattcaaatatctatctgttatcaaattataaacaaataagttcgtaaaacaatttaatatcttatatacgaaatcaattaaatattaatcacataaatattagcacaaaaaaatatggtacattcgggtctatagtagttttgcaagacttttttggtggatttgggtaaaagtgcattctggtcatatggtagattcccttattaaataaatatggtgcactcctatgttattagctaaaatgtttagattataattcagagtcatatcataaataaaattaatattaataaaataaatggctttttggtaagacggatttggagggacgggtttttgaatcaacattaataaaaaggaaaatataattaattcaccgtttcaatacgggttaaatctttaatttataattttttaataacaattaatatatataaatacttaataataattataaactgtaaatatataaatattttataaaaataaaatttgcaagttttaatatatattacttttaaaaaataaatcatcccgcggtataccgtgggttaaaatctagttatagcatatatttatgatgctgccaatatgatccgaaaacccgattgttcttagtaaaatttgtcattataataaaatattatttctttaattttaaaacaattattttttgggttaagtctcaatattgttgttcaaatattattcatttttaaaagataaatttgttcaggtaagatttttgagatttacaggccaatttaatgctagggtgcgtcaattaacctcaaataataatagaaactaacgcaagagagaagtcgacattggtcacgaaaacccgcagctgagtcatggctcgacacgactcacgagagtctcccaatccagctcggggacaacttttctagtagcagccaaaattggtatctcccattgaagcctaacaatcaaaaaggttttggcatccaaggcaaagcaagtaaacgtttggaatggaaacgtgtccaccataaaaagaggctttactatagtgatgagataacgagtgcataccaaacgtaaagagtaacgcactaaatgaaaaaacaaacaaaactccatttcaataaatataatgcatgaatgcgtccattcaacacatgcaaaaagaattaagaaaacaaacgacaacgaagaagagaaaggggacgacgcggcgtgactggctgtccttcaaatagacagaaagtcaaaaactatgagaaatataattttattactcaataataatgtcaagttaaaattatatatgttacaagttatattgatcgtccaattaataataagtctttctatctcaatatataatttcagttgatttgaaaataaaaatacttgtttggaatttttactttgaaatcatcataagttctattcagtggctaagtactttcaagtttcaaccaacataaagatcttcagaatttaacgaagtggatcgttcttcttagatcgtaatctttgtgaatacttaaaccatatttttgtctatggtaaacgaaaaaagaaacatgcatgtggtatattgactggtgacttcttaagtccaaatagataggttcatgtttgtaacttcgatgtcacataagaatatgaaaagctgtaaagctaagaccagccagagtaagatcttatcgtttagatttgagatcttcaagaaaagatttagcatatacaaacaataaactaatcacagtatatacgtacgagcagcttcataatttgagaaagtcaagtggggactgtacatttataattatttttatatcaactaatgatttagatggtactggtaggacaaaataagatgtgaaatatttaactaacaaaataaaataagctatgaaatatgtgtaagataggcgatataatcggtgcaggaaaaaccggaccaatgcagacgatttagccaatacttttagggataatttgctagataatctgtttttatattatagtttgttgaactttcattttcttaacaaacaactctttttttttttttcaacgtaacaagttagacatacctatgttgatacaaattgtagttgtactattaattaacagaacgttaaaagtgtgttatagctcacgttttaagttattaattattggtggtatgaaaaataatttgatttttttcatgtttattgataacttgcaaaaaattggatactttcacaagttgcatgatttatttcaagcgtaacaaatatgttttgagtgatatacagtaatataacaaatatagcaactagtcttggaaactttcaaattctttcaaaaattcacaaatatgtttggaaactttcgcctaaatgttgaaaatcttttacaaacttttggaaactttcaagacttgttgattttcttcactatcaattatctaactttgattccttttcttcaatttctttctatcttaatgtttcaaacttatatatatgtcgtgacgagctgtgacgagctgtgatacaaaccacaagtccataaccggcctttgatgcacatgtctttttgccacctccacctccaaaaaaacttaagtctacacgtagaataaaaggctgctacatcactccaatttatctatctctatctcttttattttataatgttagaataattcagattggtatgtcaatattataatattatgagctgtacgtgttctattcggttccatctattgatgtccgtcgtgggacattcctcacgcgctttggttgcccaatctgaacacattggtaaatgtgttttcaactataaaccaacgaagatttgatgaaaaagaaactcgtttttataacaaagctaaaatcaaggaaaattgacccaatgaattttttattatatattgttggactgaccagtcactattttacccatcttaaagacttaaactaagttttgttctgtcttctctttcactcttcagacagacacaacagtgaaactaaaaagattagatttcttcggacaaagattttctcgagattggagaaaaatgaagttcgggaaagagttctcgtcgcaaatggtgccggaatggcatgaagcttacatggattatgattatctcaaatctcaacttaaagaaatcatcaaattcaaacgcaaaaccaatcctcacggtcctcatcatcatcatcatcacttacttcacaggaaaatgactcttcaccgagcattcagcggtttaatctccacatcaccgaaaaaaaagaaacaccacggacacggcggcggacacggtggtggtcatcagatcggacatttctcagattccgatgatgacatcgaggagggaattaagcatgtcactgcgccgattctaataaactcggcgagtcatggttacgagacgacgtttttgatggcgtcggaggaaggaggagagtacgagacggtgtttttccggcgactagacgatgagttcaataaagttgagaagttttataaagagaaagttgaagaagttatgaaagaagctgtgatgcttgagaagcaaatggatgctttaattgcgtttagggttaaagttgaacatcctgatggttggccttgggaggaacgtacggtggagatgactcaattagcttctgatgttgctaattctgcggcggccgtcgctgcttctactcccgccggtgctagatctagtaagttcaagtaaacctacctttccggtttggttgaaccgtcactgtacaccgagtcgttggattgaaattgatctgtttctttctccggttttgttgatctggttttatcgaaccgtaatggccaaactgaaattgatttgtgtctttctctcgtttgattgatttatccggttttaccaaaccgtaaccgttactgaatcgtttagttgaaattctctagttttgttgcactctctccggttcgattattaattctggttaaatcgaacggttaaattgattctgttgcagattttcagtatttggcactatccggtttggttaaaccgtaatttgaaatttgaaattttggtttggttgcagtgaaagttggagctcaagctcacatggaagcgatacaagaaggaggatcaagcaaagctggtaaatcctctgacgaagaagatgatgatgatgcagagaaagaagaagataacggtgtttccggcgaagtgtccggtgacgtgaggaagatgaaagctgggagaccacctccgattgaggttttggatcgtgtcaagtttaaccatacgaaggaaacgccacgatccaccattaaaagtgttctccaggcctcgaatttgacggagcttaaatttagcagagagaatctgaggaaagtggaggcgaaactcagacgcgccttcgttgagttttaccagaagcttcggttactcaaaagctacaggtacgtactcgtatatgttgttgaattggatgatcaaagcggattcatggagttttatgattgatggatttgagattcgatgcagctttttgaatgaattagcgttttcgaagatattgaagaaatatgataaggtaaagatttggtttgaggtttgagaggtttttgaatttggggatttttttgaagtatgactgaaaggtgttcgatgaaattcctctgaaacagataacttcaaggcatgcttcaaagtcttacatgaaaatgattgataactcttaccttggaagctctgatgaggttactagactcgttgagcgtgttgaagctacgtttattaagcatttctccaatgctaacagatcaaaaggaatgaacatcttgagacccaaagctaaacgagagagacatcgaattacattctccacaggtggacttcattttactactttatactgatttcgattctccttcaattgctaatgcagaacttggtttcaggtttcttgggtggatgtttgttttctctagtagtggctctattcgcaatcatacgaacacgaaacattttgcaggaggaaggccagaaacagtacatgaacactatgttccctctttacaggtttgactataatgtttcttctgttctcatgaatatttaaggtggaacttaatgttttgatgcactctgccttctttgatcttcgtacagtttgttcgggttcgtcgttctgcacatacttatgtatgctggtaacatatactactggaggcggtatcgagtgaattactctttcatatttgggttcaagcacggtactgaacttggttatagacaagttctatttgtgggattaagcattggagtctttgcacttctttgtattcttgccaatcttgacatggaggttgaccccgaaactaaagattatcaagcattaaccgaacttcttcctcttttcctgctcactgtaagtctataaatccaatattcagcttttaatgcgaaaattagcgatatgacaataataacggaatgactgtgtgatatagggtatgtttgtagttctagtcttaccattcaacatcttctaccggtcgagtcgcttcttcttcctcacttgcctctttcactgccttgctgctcctctatacaaggtaggaacagaaactgaacgtctcattgatgattgatgatgaaaaataaaaatttgatcattgtacttcaacatatccaaatcttaatattcgacttctcctgcaggtaacattacctgatttcttggtgggcgatcagttaacaagtcaggtgcaagctcttcgaagtatccagttttatatatgtcattacggttggggagattacaaacatcgaataaacacttgcacagagtcagatgcctacaatgctttcttattcattgttgctgtcatcccatacgtctctcgtctccttcaggtacaaagcttgttgagttcatacgaaatccaaccattcgaaactctcttcattcatataatatttgctaaagaacactatatatttgcagtgcttgaggcgactgtttgaagagaaaaacccagaacaaggatacaatggcctcaagtacttcttgactatagtggctgtctgcttgaggacgacttacagtgtcgacgaggataatcaatttatatggagaatattagctgggatcttctcagctattgctgccattttctgtacttactgggacttagtctatgactggggtcttctaaacagaacatctaagaacccttggctccgtgataaactccttgtcccgcagaagaaagtatacttcatcgcgatggtaagcacaaactatagagtaacacaacatttggaatcctagtgcaaaattgattcttaactttaaaaacatatgcagatcttgaacatcttgctcaggttcgcgtggctgcagaccgtgcttgatttcaatttctccttcatgcacagacagacgatggttgctgttgttgtcagtctagagattatccgccgtgggatatggaatttcttcaggtgagaaaacataagttactgcaacttttcttcaccatgtattagcgctatttactgtcacacaacatatgatataactttcttggggatttgtttatgcaaaaaaacaggttagagaatgagcatttgaacaatgttgggaagtatcgagcatttaagacggttccattaccgtttaactacgacgaggatgacgataaaggcaactagttttctcggtttctagtcttagattctgtaaagactgattcatccacaacgagtaggaggaagatggactagactaaagctggttcattgagatcaaggagatgtttcactcaggataacggatattcgctagattagccatagtaattagggtcactgatttgcacttaaaatttgtttcattgagagaaacatgaaattcatgggcatcaacaaagcaatgacttaaaaaccaaattctcccacaataacaaaagtaataatcagaaacattcaaagtatcagaataacttaaccaaataaattctaataatcgctcactttcccttggtttcttcttcttcttccttcttcttcgccgcagcggctgcctcctccccttgttccaactcctttaacgactgagtccgcatctctttctgcattgctagaaacggtccgtagtaatcgacgttagtatacatacatgtaatcagcttcaatctagcatctcgacagttcgtgccgtcatctttcacttccctacaatgatcaacttctatgaatgcatctttgcaatcaccttttttcaaataccgactaagccaacactcttcacaatcttcttcctctttctccttgttagtctcactcaaatcatcatcagaacttactgttttggatttgttcggatcttccgaagcagcagatgaatctcctccttcatgatccaaagggtcgttaccgctttttggtttgctctcagaattctcagcattcgcattcatagaagacatggttgtttgattttaaaagacgaagttaggtttgagagtcaagaacacaagtgggaagcttaaaacccctcctcttaaaccctttagttatgtcggcttttaagttttaggaaatagtttcgttaaaacctattcttggagaacaagtggtggtattcttggagaacaatttttcttttatggtattttaagatttttttaattttaaaaatggtattttaagatattttctctttaattatcttattacttaaaattatatacattattttataaaattttgacatttgtaattttttaaagattactgtagtaaaaatttgacagtcctaattagaagtaattaaattttaacatggtttactttttctaatattcacttgttacaataggggtcaaaatataacattacaaagtttatggtgtaaaaagtaataatgtagaagtgaagatattcaattgaaatataattttattacaattaaaccatgtcgtggagacatgttctgaaataaagttatgaagtcggtgagtgactttagagtctccctcaagagcaatcaatggatcagaattcgtacaggagaagatcgtctccgatcagaaccactaccggcggttcaaagtccgttaatttctccgaactacttcaaatgaagtatctcagctccggtacgatgaagctcacgagaaccttcactacttgcttgatagtcttctctgtactagtagcattctcaatgatctttcaccaacacccatctgattcaaatcggattatgggtttcgccgaagctagagttctcgacgccggagttttcccaaatgttactaacatcagtatgtgttcttccaagtcaaagttttgagctttattactttagatctcgttctttacactacgcatttgcctctgtatgtccatagctcttggtcgatttcaatttgagatctatactcataaaaattgagtctttgtcagtcacaagactactatttttggtttgatgttgttttggtgaaaaagtgctcttttgttttggtctcagcttagactgttacattcgttttttccgagttttttagattttgttctgattctgttttgttttgtagattctgataagcttctcggagggctacttgcttctggttttgatgaagattcttgccttagtaggtaccaatcagttcattaccgtaaaccttcaccttacaagccatcttcttatctcatctctaagcttagaaactacgaaaagcttcacaagcgatgtggtccgggtactgaatcttacaagaaagctctaaaacaacttgatcaagaacatattgatggtgatggtgaatgcaaatatgttgtgtggatttcttttagcggcttagggaacaggatactttctctagcctcggtttttctttacgcgcttttaacggatagagtcttgcttgttgaccgagggaaagacatggatgatctcttttgcgagccgtttctcggtatgtcgtggttgctacctttagatttccctatgactgatcagtttgatggattaaatcaagaatcatctcgttgttatggatatatggtgaagaatcaggtgattgatactgagggaactttgtctcatctttatcttcatcttgttcatgattatggagatcatgataagatgttcttctgtgaaggagaccaaacattcatcgggaaagtcccttggttgattgttaaaacagacaattactttgttccatctctgtggttaataccgggtttcgatgatgaactaaacaagctattcccacagaaagcgactgtctttcatcacttaggtaggtatctttttcacccaactaaccaagtatggggcttagtcactagatactacgaagcttacttatcgcatgcggatgagaagattgggattcaagtaagagttttcgatgaagacccgggtccatttcagcatgtgatggatcagatttcatcttgtactcaaaaagagaaacttctacctgaagtagacacactagtggagagatctcgccatgttaatacccccaaacacaaagccgtgcttgtcacatctttgaacgcgggttacgcggagaacttaaagagtatgtattgggaatatccgacatcaactggagaaatcatcggtgttcatcagccgagccaagaaggttatcagcagaccgaaaaaaagatgcataatggcaaagctcttgcggaaatgtatcttttgagtttgacagataatcttgtgacaagtgcttggtctacatttggatatgtagctcaaggtcttggaggtttaaagccttggatactctatagacccgaaaaccgtacaactcccgatccttcgtgtggtcgggctatgtcgatggagccttgtttccactcgcctccattctatgattgtaaagcgaaaacgggtattgacacgggaacactagttcctcatgtgagacattgtgaggatatcagctggggacttaagctagtatgattttttgtgtgccttactctgtttttgattatttgatgtatcatgtaacttcttaaattagctttaataaagtcaatttttgtgcttttgacattttctcttaaaatagataaaacaagagcataaaggttgagtttttattaccaaagtctcagtttttttttgatgatcttttgcttattctcttactcttcctatgtaacaaatgaggaaagtaaaagggagagatcagatttgatttctttttccatttttgtttagatcttagggtttctgaataatgtatccctccagaagaagattatctctttccagagccattgatcaacaaccggaagatcaatcaggagtccaagaaaagagttgcagattcttaggagcaatgagaatcacagagatcttagctttgttcatggttttagtccctgtctcgctagtaatcgtagccatgtttggatatgatcaaggaaatggctttgtacaagcatctagattcataacaatggaaccaaatgtgacatcctcatcagatgattcatcactagtgcagagagatcaagaacaaaaaggtaaacttactttcttctttttgttttgaaatgtttctaaatttttctttgaatgtttcatcagattctgtagatatgtctctgcttggagggctacttgtatctggtttcaagaaagagtcttgcttgagtagataccaatcttacctctaccgtaaagcttcaccgtataaaccttcgttgcatctactttcgaagcttagagcttacgaagagcttcataaaagatgtggaccgggaacaagacagtataccaatgcagaaagattgcttaaacagaaacaaacaggtgagatggaatcacaaggatgcaagtatgttgtttggatgtcgtttagcggattaggaaacaggattatcagtattgcttctgtgtttctgtatgcaatgttgacagatagagtcttgcttgttgaaggaggggaacagttcgcggatttattctgcgaaccgttcctcgataccacttggttactaccgaaagatttcaccttagctagtcagttcagtggctttggtcaaaactcagctcactgccatggagatatgctgaagaggaaactgattaatgaatcctctgtttcgtctctgtctcatctctatcttcatctagctcatgactacaatgagcacgacaaaatgttcttctgtgaagaagatcaaaatctcttaaagaatgttccttggttgatcatgaggacaaacaacttctttgcaccgtctcttttcttgatttcttctttcgaagaagagctcggtatgatgtttcccgagaaaggaacggtttttcaccatttaggtcgttaccttttccatccttcaaatcaagtctggggactaatcacaagatactatcaagcttacttagccaaagctgatgaaaggattggtcttcaaataagagtctttgatgagaaatccggcgtatctcctcgagtcacaaagcaaatcatttcgtgtgttcaaaacgagaatctgttaccgagactaagcaaaggtgaagaacaatacaagcagccatcagaagaagagttgaaactcaaatctgtcttggtcacctctttaacaacaggatactttgagatcttgaaaacaatgtattgggaaaatccaactgtaacaagagatgtgattggaatacatcagccaagtcatgaaggacatcaacaaacagagaagctaatgcataacaggaaagcttgggcagagatgtacttactcagcttaacggataagttggttattagtgcttggtctacatttggttatgtagctcaaggacttggaggattaagagcttggattctgtataaacaagagaatcaaaccaacccaaatccaccttgcggtagagctatgtcaccagatccttgtttccatgctcctccttactatgattgcaaagcaaagaaaggaactgacactggtaatgttgtcccgcatgttagacattgtgaagatattagctggggacttaagcttgttgacaacttttagataatcaacattgtaatgtttcctttttttctgaatgtttcagttgatattaaaagatagaagaaccaagccatttccattattgtctttcactaatgacttcttttacttaaccctgtaataggctctgttttagtgcgcttaatcactattaggcccatataataattttcttgtgtttttgttttcccaacagtaagtgagaaaaagagaaactcaaaagttttctcaactaacaacggaagaatagggctttgcttgtttgagtgaatctcttaaacagtgtctcctcattttaagtagggaagttacatcaatgtctatcttcttacacgcctaactttgttctgtaactcttttctttttgtgtcctaaaaactctttataaacactaatctacactcccttaatctctcatctatccactcacacacacacaaaccatggcttcttcttcttcttcttctttattatttcctttctttcttattcttttttcatgtttaatctcggtttcatcgtcaagaagatcattaatcgaccgtactcttccgaaaaaccttccgagatccggttttcgattgagtcttcgacatgtggattccggtaaaaacctcaccaagatccaaaagattcagagagggattaaccgtggattccatagattaaacagattaggagctgtagctgttttagctgtagcctctaagcctgatgatactaataacattaaagcacctactcatggaggaagcggtgagtttcttatggagttgtctattggaaacccggcggttaaatactctgctattgttgataccggaagtgaccttatttggactcaatgcaagccttgcactgaatgttttgatcaaccaactccgatttttgacccggagaaatcttcctcttactcgaaagtaggatgctcttctggtctttgtaacgcattgcctcgatcaaactgtaacgaagataaagatgcttgtgagtatttgtatacttatggagattactcatctacaagagggctcttggccacggaaacgttcactttcgaggacgagaactcgatttctggtatcgggtttgggtgtggggttgagaacgaaggcgacgggttctctcaagggtcaggtcttgtaggtcttggtcgcggaccgctctcgcttatttctcagctcaaagagactaagttttcttattgcttgacctcgattgaggatagtgaagcatctagctcgttgtttattggatctttagcctcgggtatcgtcaacaaaacaggtgcaagtttagatggtgaagtcaccaaaacgatgtctttgctacgaaatccagatcagccttcgttctattaccttgagttacaaggcatcaccgttggagcaaaacgcctttctgttgaaaagtctacttttgaactagccgaagatggaaccggaggtatgatcatagactcaggcacgaccatcacgtatctcgaggagaccgcgtttaaagtgttgaaagaggagtttacttctcggatgagtttaccagtagatgactctggatccacgggacttgacttgtgcttcaagttacctgatgctgccaagaatattgctgttcctaagatgatttttcattttaaaggtgctgatttggagcttcccggagagaactacatggtggcggattcaagcaccggcgttttgtgtttggccatgggaagttctaatgggatgtctattttcggaaatgttcaacagcagaattttaatgtacttcatgatcttgagaaagaaacggtgtcgtttgttcccactgaatgtggaaaattgtagatttttaatttgttttttttttcttttattataaatgaaatttatactttgtgacaatgtcaagtgcttcaatagttttatccgagtaaattatatatccgactacatagaaaatattggtttactgttttgctggtatgaaaaaacagaagtctctttgccacaaaaaggaaaaaaaatcattttaatttgcatattgatgaacctaactagactaaaaattaagtaattgtatatgtttccatgtgcccgtgaaaccacaaagataattatcatgtgcttggatttttttgccgcatcatgtgtgagttaaagctggaaaaacttctaaataaggtaacattttgtaacaaaaagtagtctatttttgattattaaaatctatataaattgttaaccatagattggagaatcttctaattaatatatatatattaatatttacgtaacaagagtggtaatttgttttggaaggtcttgttccaccatgaacaactttgatatagacattgatatgatgattcaatattagaattattgacaataatgaacactaattattattaaaattattaaacttggaagcaaagtaaaggggttggctcaacttccaagcaactcgagagagaaagagatgaaatgcatgcgtcatgcaatttttatcaatttggaattataaacacgtcgcctaacaaacataattaagccctaaccatctcacctatttttttctttcttaaatcaaattgtttgaaaaccatgaaatatattgatgtatcttattatcttatactgattcactaaattttaacatatgtttttagaaggaaaaaagatatattgtattttagatagtattttagatctgttccttctacgattgtatatttctctctcatatagaactttagagcatatgtggatttggtgtcgaatgttctttggtcgatatctcggaacatgaaaaggattagactaaaatgtgattgcttgaattagcttttagcctttgacaattgacactcacgggatgtttagtatattatgggctttaaagggcccgtaataatttatatattcttgctaaatcgacccattgtgaagcctctcttaaaactaatttataaatgtagataatgaaaattatagttcaatgcatgcatacatagccacatatcccatatggattattattattttattttattttaattttgggtgcaaatcccatatgtattaatttacattaaatgtaattaaatgctttcatacttttcacaaataactttctatgatagaaaaataccattacattatttagaaaatatgaaatgatttaatttattacatttaatgtaaaataatacatatgcgatatgtgtaggtatgcattgaattatcatttcattatgaattttcactacgtggctaaaagaaatcgtaaatgtttaattttttaacagagagaagccctagggcacatgtattttgataaatttccagtgcccaagtcttcatcaaacggtggcgatgtacgctatattttatactgttccgctggcgaaagaattcagaatcgccagaggctttttggttggaaagaattaattaacattggcatatataagtaaatattgttaaacattataacatgatgaaatacaaaaggaaaccacaaaccatgaattcaaagaaacgaatgcaatcaacaaagattaaagaacatcgagatcaacacttagaaaacggaactttatggttttactttagatcctcaaaagcccaagcgttttccttacgaatcgcgtcttcttcttcaggtgtgtaatcattctcaatgttaaagagttctcgaacttcctctggcgacatatctttcatgtgatctgcaacggtctggcaagtgagaccaagaagatcttggacgttgagataattaacagcgagaatgagtttcatgactgtttccatatcaaattctttcatgaactctgcgtcccaagtcctgagctcgttcttggcttcctcgtttacattttcgcttgttgcttcagtagaatcatcactatcatcaacatcatcaagtacgtgtttcttgcaatactcgataaccaaagcgaggatatttccggtgacgttttcaagcgggattgctttatcggcgcagtcgtcatcgatcatgtgtgctatgaccttcaatttacgagccaccgcttcctcaacctcgaacgattcatcatccgagctagtcaacacaatcttgttcgaagacattgtttgttttgttgttttgttgatttttgagagattttatggaagaaatgaaatgagagaaattgttgaataaaattgatgaagctatgaaataatgtctctctttttataatgagttgagagtgggtcaaatctttaatttaggaaatatagtaaggaaaaataaatataacaaaatcctactatataattaattgttaggctcttatattttcttttaatatttgacccatacatatactacacacatgctaataaaattatattgattagattttatataagttatactaatattgtaatttaatattttaaaaatattaaccattatagataggatttcacctaaaagcaaaatttaatttttggtatctcttatcaactcaatgtaaatattaaatatagtataatatagtgagatttttttatttataagttttagaaataattaatttgatgacatgtactttgttctaagatacttactttttcaacatttagcattttagcaacaattttttttttgtcaataactttattagattaatttaaacaatctaattctgaggaatattgtttatataagtaattaaatgtggtttagatgttttgacttttttattatggcagttatgtagtggcagactcataacttaattttaccggggtactccaaaacagaaacgagttaccaggagcactatgatgtccagggccggccctgagctaaagctggtgaagcatgggctttaggcgccaaacggtattaatgatttagagggcatcaatttccaaaaagtttttctggcacagtggttatgttgcctttcaattagacgagttcgatatagtctacagtttttgtgtatttttttttctattacttgttaatgggctaatttttttttttgctttaggcatcaaagacaagaacaagttctctagaactaagccatacgctccttctctacggaaattaattcatgaaaccaaaagcttgaagaaattcagcattatgagcccgtctttacggaacgatgattaccgaagttttctcaatcctttaaatccatttcctctgaattctgagctcatgtatatgacattacacaacatctgcgattggtggtttttctaggattataaagcaatctttagtaattcttaaggtgagcaactctttaggctcgacaagctcttgatcaatttgcaaacctttcaaagtttgaagaataacggcattttgactgcatctccaaggagaagtagttaccgaatcttcgacaatctctcttatccggcagcttcttccgtggaacgttttcttaaaagcttgtatgcgttgttcgctcgagccatctataaccacatggtggtcgaggaatttgtgaagtctgtctttatgggcgaacccaatttttgcttcaacagattttttaatctttgcaaactctttaaagatgagcatctttttgaaaaactcatggagccattatctctcctccttttgtgtttttttcagtttctatttgtatgaacatccctcttttaggttttaagtaaattaaagttgtttgacaaaacaaaaaagaaagcccatacgctcctatctctctgcctctctctctttttctctcgctttatgatgttttctacgtaataagtgttgatatgggccttgggacgcttcatatgagattggataagttttcaacaaaatttacgaccaaaaagattgcatggcaaaattcaactgaatagtattaatttgcatattaacatcctctcgcatgaattttctttcagtatatcgtccgtatattttaatatcataaaataataaatcgctctaagaaaatcttaacctctcaattatcaacccgaaaagaaaaaaaagaatattaaaacgaagtattttattcccatcctagatttgggaaggaaaaggaaaaaaataaataataataatataaactaaattattttgtacgtataactatatataaatattaaataggagcctaaaaataaatagtaatttcttatcgctattatatagtttaataaacaaattaagaaggatattcaaagatacggagaaaccctaggcagggccaatcatttagttcccaacaaaaaaaagagaacggcggcgatattatgttctattctacgccggagaagattccgaatcgccggaggtttttagtggacgattcgattttcactctaaaacgaacaagattgctaaagcatctatttattgatcaccataatagagagtaaggtaaagaactaacaacgaaatcaaagtcatcaatcacaccacttgaataagccaaaatataaaatcattcacgaaatcgaaatatggaaaaccaaaaaaaaaagagagacgaaagtcatcaaaaccctaaaaccgacaataagaaacgaaaccaaaaactagggttttggtgtctattcaaaagcccatgcgttttccttgcgaaccgctgcttcttcttcgggtgtgaaatcgttctcgatgttgaagatttctcgaatttcctctggagtcttatctttgatgcgatctgcaacggtttgagcagagagatcaagaaggcctttgatattgagatagttagcagcgagcaagagttggaagaccgtaggctgatcaaatttcttcatgaactcttcgtcccaagtcttgaactcgtcgctttcttcgtcaacgacgtgtttcttgcaatactcgacaacaatggagaggatctttccggtgacgttttgaagagggacctcggtaacaacacagtcgtcttcaatcatgtgttccacgattttcagttttcttgccaccgcttcttcaacctcgaaagattcgccatcggagctagacaaaacaatcttgttggaagacatgtttgttcgtttttgagattttgggtgatgaaaagaataatattggttatgatttatgcaaagatattgaatggaatagagaggagtcgatgaaggcgtctatttataaaatattttaagagtcggtcaattgtgttttccttttcacaatactggaagagaagaaaagcaaatcttccaaatctctagtgtttagccttaaaacttttgggcttaaaagtaaaaaccgacgtcttagtaaaagagtttatcaggagattctagaaacttatttaacatacaaaaagagtttttttcctaaacatggctattttctatgaaaattttgtatgacattttatttatttaattaatttgtccatcttacttagaattgaatttaattgattaattattaatctaattataggataagagtctataaattaagttttgtaatcagttgcgttcttttagtttattaggttttaattttctacttttatttgaataactactaattagaagagtaaatctcaaattaaataatctctattgatctagctagattcgagcctcgatcaaaacagtacataaaaaaataaattgttctaagaaaaatcataaataacctcgtaaatatatatacatgtttgtatataagaaattcttgataactagcataagaaaagaaaaaaagaaaaactttgattcatacgaactaataattttaagaaaaagagaaaataataggaagttttttaacggcggcgacttttttttactacgttacaaccggagaaagaattcggaattgccggaggatttgggtggacgattctctttaattttttcataattttggtggacgattcattagttgagatttaatccgcttcactctaaaagatagctaaagctaaagcatatttattgatcatcattcatcataatagtgcaagaaaattggtcaattaagtaaagaaagacttaacaacgaaattaaagagaccaatcaatcccacacacacttgagaaaacagaaacaaatcatacatgtaaaaggaaaaaagaaaaaagaaacgaagcaaaaagctagggttttggaacttgttgttttccatcttgctcaaaagtccaagcgttttcattgcgaattgcttcttcttcttcaggtgtgaaatcattctcgatgttaaagagttctcgaacttcctctggcgtcatatcttttatgtaatctgcaatggtcttgctacagagatcaaaaagaccttggacgttgagatagttagcagccagaataatgtcgaagatcgtcttaatatcgaaatccttcatgaactttgcatcccactcattaagcttctccttcttatcctcagcttcatcatctccttcagttgattcaggtacggccacatcatcaggcttcttcttcgcctcctcaactgttttatctcctttcgtcgatgattcatgcgtctccaccacgtcatcatcgtcttcaacgtgtttcttgcagtactcgataaccttggcgagaatctctccggtaacgtttggaatagggattttgtttgtagcacagtcgtcttcgataatgtgtcctacgatctgcagttttcttgccaccacttcttcaaccttgaaagattcaccatcggagcttgtcaacacaatctttttcgaagacattgttttttgctttgtgtgttgaacgaaaaacaagagtcaattgtttgtgaagagaaattttgatgagagattgttgaatcagtctatttatagaaccctaagattcagtcaattgtgttttccttttcacaattagatattgggtttcatgttgtttccttttctcacaaagaaataaggaaaatagactcaaatcctattttaactagggtttagtggaagatatatatatttctagaaacttctttagcaatatactaatatactccttttgttccttgatttgtatttttcgatgcaaagtttataacattttctgtaatcttctaattttgtttgacgtgggattaattattaatttaattatgatataagagcatattagattatgtagaatctaacaaaaccttaaacatctaattttttggtattattattcatggaaaaaaaaagaaactcgcaagattactggttattgtacaagttcctcgatcgtgaatccattgttattatcaatgaaaacaataggaatttgttgttgattcaaaacagtcgaaaattaaactactgaggaaacaaacaatgtctcaggaagttccaaagacagaagacgagaacattattagaagtattttgttttctatagagacaatctaacaagtttattgtataaaattcgatcatctcttccagtgttgctctctaacaaagcgctctgcacaagttcctgcaacatcatttacacattcttttattcaattgacacaattctatgtgtttaaaagaatgatgacaaaactctacatttaccttgacttcacggtgagatagaaactttcccaagctgtgaatggttactctcatatcttcaacctgtaaaattacacgaaacagtacttcagctgcattcacagagactatgagatggctttatgtacaagacaaattagtcttcttcttaccctaacatagcctgcctggttacggtcaaaaaatctgaaagcctgagccaaagaaacaaagtgaagaaagatttagcaccttaaccgcagtatcatttaaaccgatttctcaagttttgtagggattatttatttacctgcaacagctctttatcaactgtttcttctcgttttgctgcatcagatgttcctccatcttgtttcccgtgcttttccgtttccgacttgggtttgatttcagtttttgagtcgttaggacctctttcttcttttctattatcagtttcggcttcagttataggatcagcaacagtgccactagttttctcaaggttttcttctttcttctgcggctgaagaagagacatgaaacaaaatgagaagatttatgaagaaaacatcttgttgttggattcaatttgaaagagtcaaatgagtaaatcatacctcttcagcaggctcttcttgctcagtatttgcaacgtccatttcctcgcattcttctggatcttcttccggatcttcttcagggtcttcttcaggatcctcctcaggatcttcctctgggtcgtcatcaccatcgtcatcctcctcatcctgattctccacttccatattaacagcttcacccacagtaacttctttactgcccaaagtttctttggtctttgctacagcttccttatctgcaatttcccggctaccgtccacggtttccttgcctgaagtttctttatcatccttcccaggagcagattcgcttatcaccgaggcttccttgtcttcatgttcagctgtcttttgacgcttatcttgggattttgcttcgttttgcttgacagacaactcctcctgatgcctcttccgttgatttctttgcctcacaatttttacacgtagtttcttgaaggaaacaaaaaattaagtataagaaaactgttcatgcgactcggacacaataacgtcaaagatcaattaaaaactaactttgagaaattcaaagatacgggaacccatttgatactgcagcatctcatatagcgattccgcaaacaatgaaatctgcaagaacatagaagatagtttgatgaaaactattcagatgtaacaacaaaatgtggtacactaagttccagtataaagaaaacgaaaacaggctaagcaaaacgtaagggaaaaacaaacctcaaatgatgactcatcaaggtccttgtcagtgtaatccaagagcgaatccaaagaggccgaaagtgaacgcaactgccaaaaaaaaagcagttacgaccataatatagccattaccaaatgtaatgaaacttctaatttcctgtccacctactttggagtctttgttccgttttgtctgtagaataaatccagcgcgaggaggttcctcacactttttcctgtccttcacttgaatcctggactcatcttttccacctctctcttttatctctttctcggtaaccttttcttttacctctttctcatcagtattattcctatcaattttcttcccctcagacatagtctctgagttgtttttcttttcagccttcttgtcttcacctgtcttagtgtctttcttgcttgaactagaggcaccctcctttttcttagtatccggagatcctgtttcctgttttacatccacagttttggaggcattctcgtctttcacatcttctaaagattcggccgtcggtttcatctccacactacctgaatcagaggatttcttgcctacctccatcacctttttctcatcactatctccgtctttcttggagtcaccgtccattttgttgtctatttcagcaaccttccttttagccacccttttaataatttttttctttacaattgtctttgcaggagtctgctcattagccttagcactgggatctgaggtatctccagtttcagctacctttttcactatttttttgttagaagatgtaccagtggactcttcttttgggactgtggtctctggtatggcaacatgttcaggaacatccgacttctcacctttcataccagttgcttttccatcgttgacaggcctcttaacaactcttttaatgatctttttaacagtcttcttagttccagttgtcggagtgccggaagtatctcctggtgactttttctctgcatccttggttacttcaacagtatctttcttaacctcctgagagagtagtcgatctctttcagtaagagctttcctgtgtgccaaccattgggttctccaaacatcaaatgaaggaagacattctgataaatcggggacaaaaagtactgtgatctctttgtagctaaacactccatctgtaccaactctgtcataatgtatctgtcaattccaaaaaagagaggcaaagctaagctacttagatttccatataaactggcaagaaagtaacattgctttgttagcttataacttatcctaggtctaccatattgacaaaaaagtgaaactgcagtaaaacaggacacaaattaacaatttttgcaagtattcatagagcaaatctctggataaaccaatatcatatcatcttcaacgacctctacctatagaaaataagagagattgtacggtatatatactatcttagctacaatactcaagtgtaatgtccccacacgtccaacatctcaatgcagtcttaaaccaagagaaggaaaacctacctctaggaatggattccagtgacggcagttactcagatcaagatgaagcttatcctttgagtgtctgcaaaggaaaaggtttttcaagtctcagacaatgaacaaaacggcagcaaagaatgacaaaagaatacgtgaagagacaaacctcagcattgtctgaattaaggaagactgatcaactgatgggtccatgccatctgtgggatcccaggaaccaccaatcgccatgaatgaatgatcttttttaagaacagcgaattttaatatgttgcatatatgaggtatacgatcctcaaagaatttatctgaagcaagatcttccagagcagtcctgctcagcccgctcatcaaaaccatctgaacagcacataaaacccataacacatgagcaattctttcaatatactccgaaacaatagcagcaatgatacatcgtgcaaacatgagcaatgacataattaaagaggcaatctttatcaatgagaaagaaaaaaacagccaaccttggcgttccaaacactttttcctccagttttcaaagctaaaggcttagtggaagtacttttcacatcagctccaccatcttcaatgtaatcatgctcaaaactgtcgtcctcaaaaaaagatggttaggtctacaaatacatttaactagatagtatataacaaaagtgaatccacaaaacttgaataatgtgtgtaactctacaatacggactgggcaagggaaacaaaaatccagaacagatctatttaaaccagttaagaaggattacaatcctaagactgacaaaatgtaaataagaagcagaataattcacctcacagcagtatgcatagaaagtgtaagcttctgtttcggccagttcacaacaacctgaaacatatagtacatttgaggttaacaatcatttagaactccactaaggattagataataattgggagatagaataacagaaaccttcgagaactcagaaggcacaaaaagcctgggatatcttttatctagtgtcacgtaatccctctccatgtcaaccaatcgcgaagataaaacctgcacataagtcacccaatagtttaataaagaataatgcacactgcgcttaagcactgcatcacacatacagagtgtaaggtaactctgcccctcctatctctgtcaccatcaatcttattaatgggaaatataacaaaaagtccttgatttgagaaagtggtaagcatcaagtgtctcatccttgtaaacatttccacatttaattcaatacgaagtccatcagaaaaaaaactagtaatcaggtaaactaactggagacacaaaaatgaggaacctgatatatgtcactaattttaaaagcaggcaaaataacacccagaggtggcaagaagacagaagcttggacaaataaacccacaactaggaaaggccaagtaaattcgccacaaaaggaaagaggaagtataacaagcccaagtacaggaagatatcccgtcgacagaaaaagaatgagaaagctgaaaggattatcttgataaatggcaaggctgatatagtaattgaggagggactaagagatgtccaagtcaatcaataagaaaacaacgagaatgcaggaatggaaaggaagatgaggtaaccctgaggagtaggcaaaaaaatcactgaaagaggaatctcttggaacacttattaccttgcagacataatctcttcttattggcttaatcggtgaagaacgccttcaggtataacagaaataaggttagtgcctggtgcaggaacataaaatgccctgtattccagatgaagaacgtgacagagatcaaaaataaaacctaattgatgcttcacgatggtgtgcatcccgccgcaaagaggaactacgtgcatccctagaaatagatttgggcactggagtccgctcctttgtgtccttggacgtagctcttgctgttggagtccgatctcgttttatttcgagagcacgttttcgctcacgttctctttctccttgtctttccttctcccgtctctccaatatgcgttccctctcccggtccctagctctttgcctttctcgttccctctgacgctctcgttctctgtcatgttcgcgctccctctctcgttctcgctccttatctctggcgcgttgatcctcacgacgacgctcttcttctcttagatcaaactccctgagataacttgcccggtcacctttccggagatcatcaacacgaggagcagcgccagtaccacgagccagcatgccaccagggtagtccaagtcgagagacgctgcactatggatacctttcccggtgccataatccctgcctggaggtaagctaacaccataaccaggatttgaagaactctccggataaatatagtcatctaagtttcgccgaggaacagctcctaataacgatggggtatgttggctggcataagaagatgtgttgcgtactgataaaccgtgaggatcagactcaagccttcctccataatgcattgcttcttggtcagaatgacgcacagtagaacttcgttctgtaagataatcggtttgtctgccagaaatgtatgctactcagtgtaataagatatgttttttcttcaatcgttattgaaagttttgacaagaagttacagtagctttataacaaaggtcctgagagaacagatctgaaaacaatacagataacagatgtaccaaaaaatacaaactatttgaaaaagaaatctatgctagaaagaaatctggctaccgatataatagaatcaatcatcgaaaaatacctgttgacacctgcatcaacagaagaggtatgaagcgactgcatttttaataattgttctcctcggagaagcgatgcttgatcaatgcgatcatacaagtcagtctgccaaaatcatataataacgagtatcatcaagccaattgtaacaacattgaacagaaaccaaccaaattcataagattttctcttaaaaatatgagagtaggcgcacctggcgagcaaaattagatggatcagcatatcgcctagttggttcattttgcaactccctaccgagataagagcttgattgttcaccatactgccttctatcaacgggaatgtaaccagacagcttatcggaatacaaatcgtccgtcttttgaccataaccatggctcgagggagacaaatagcttccagatgcaaactttggtgaatcaggtaaagtagggacatatcccgagcggttatccaaaactgatgaacctaaaccattggtgcttaaaggctgagagctgctaagagaagttgatccatacacagagccatattgtgttccgtaatgactagcagctgtagataaatgagatctgtatccaccaccaatgtcagtctcttgaggagcacctgtaattgatggatggcgagaactcaaagaaatctgagagcctccttctgcgccaccactcactgaacttccaggatagccagatccaagctacataacaattacacataaattaagcataattaagcataatttggtttcaattgaaattgatgatcttacattctgagaataaccagattgcgaaccgtattgctgttgaccgtagccagtgcctcttgaagaatacatatctctatgcatctggtttcaattttgtaattttagttagtacattctttgagagataatacgaagaacgaacaataacaaagatttatcaaaaaaacaacatgaatcaaccgaaattttcacgtccctaaactacaatttcgaattcacatacatgattcgatcaagcgagtaaaattaaattaaattgacggactttacctacaagaagattgaaaaattgtttcttctttgcgtgtcttacgtgttgagagaagaggaagagactaagcaattgagagattaaaaagggaaaaaacaaaaccctagaaatcacagatagaggaagaagacgagcttgagagaatggtttgaggattagtttgctgtgaagaagagaaagtaaagagaacgatatgtttgttagtagtaagggttcaagttagaggacacgcatgcattatcttttaatgggcttatatattagcctttttataagttcgttataggcccgttcttttatattttcaaaacaaatttggcccgttataggctagtttgagcctccactttctgtatctctttaagggcctttgttttggttatgtattgtatcgaatgtttaatataatgttacatttgtgaagaaaaaaaatgaaaaaaaaaatgaaaatctagcattaaaaaatttagatggtaatgaattttttatagttagtataagatttagtaaatcaccatttttgatatatttgtctaaatatcaaaaaaaaaattggaaactttactcgaggcttgtggttttgtccaaaaatataatgtcaagatccattactcttctttgtatgattctatcaacagaggtatagcatcagtggagtagcacaataggcaccagctaagttaaagactaactgcctcacatcacattatcatttctcctaagctgttctgccattagtttaacatgaatgaataattgcaagtgataaatcaatctccatgttgtttttgttaataaaactgaattcaacagtgcttgtagtctgtcaagtgaggtccacattttaaatattttcagaagagatcactcaagatgtgaatcctgcttgtagtcagagttaagagtccagttcgtcaacctgcttgaagtcatagctgttggattttcatctcattctcagttaaaagcgacttcaaggaggtagatgaactggactccaggctcctttactctgactcgagtttcgctacttttgctgcagatgttttttgtctgagacaacctaaaacaaaaaatcagctaaaatcaaacccctaaaatgaagaccatcagaagagtgtctttttttaccaagaacaaccaaaaccatttttgtttttctaataagcacatcatcaaacacagacaagtttgaagcaataggagtaatgttaataggagagcgaatttgatatcactacatctttacaggtaaaactttcgtagaatgcttagtttctagaattccttcattctagatcctgtatgtgatcttgaacttttgtcgttcaaagcagttttctagttgcctttgagctataaaagcaaatggaaaatcacatacatggatggaaaagatgattaccatgtgtctcattaaagagacaatgagtcatatcttcaaaatgtcatcaacacactttgaggctttgccaaacgtatgcacctagaataccatcaccatcaaatgcataaaaagtatattaacaagcgataggaagtataaccttcacaaatgccaattaaatgatgtaaatgctgtctgctttcaaccacttcctccatcagattctcctcaatggcaaaatggttcctttctgcaaaatagacaacattctccaagtagccgagatagtgtatgtctatttcagcaattggcttaaagcttccaaccctttaaatacctctagatcatttaatagtccaacgggctcagtatcacgatttaaaaggtcaaccacagtctcgttatacactaagctcctttcttgagtctgcatagattttacaagattcatgggtaaagaaggaaaaacatatcatatcttaacaaaaatacagaaatagggaccttcaatttcatcggtagctcacttttcttatatgctcgtatatatctctaacaacactttcagtaacccccatgtgcaagtcttgtgatttctgtattcaacttatttacattttttctcaactgcataatcctgcaactaaagatcagtctcctcctcattccggccttgcgagaaaactccaacatcttattgtgctttagttcataccgtttacaggtagccgcagcagatgtgcaccctaaaatgatagaagtatataccaccaaaacaaagagttgctttaaacatctaaaataaagttacaatttgaagttctggactatggactatgacacaatgggtcaacaaatttagtcgttacctgcgtgcacttccaacttcctgactctgactgtagaaaactagaccccatctcattatgcagcttcaggtcgtgttatagcgttgttaccaactctttttccctacccactgaatcgtatagactatagacgcatagtcaacatgattctgaaatgaatactaaacttctttttgtatgatctgaaataactttagttttcatctctgcctcaataacaagaccgacacaacagctttgagatacccaaaagatcacatacaacttccatatatcatgtatacactattatgatacttgtaattgaacaaaagcatatattctactaggtacagaagatgtacacaaggggtcttatgcgtcctacttacaagcatgcagatccgaagctcttcttctgtcctcattttctatactttcacctattctttttttattcttctgtgcatagtaaatcagttttccctctgcaaatcatagaaagggcatgagcacaacatgtcatttcttactgtttgccttcttcttcttaattatatttctgcatcttggtttctggagaacgtttcggataaagaataagtgccaacgccaaagagaccataagaccaacaactccactaaaaggctgtgatgggcggctccctgcaatccaaaccggggaacttgggttgtaagtgaggaatccacctgactgtagtataaagcttgatgctatgattcctgcccgcaacccaattggaacaattagatttccttggcttctttcacgagcccaagtaagcgccaacgacagaagccaaaaccctggaattgatctcagggatctggagaattcgacaagatactaaaaacaattagtatataatccctaaagagttaagcatcacgctagtgtactttccatgaacaataattgtgtataactacaagatgacatacacatatagccagttcttaacaataaaatacttaacaaagatatatacctctggaacaaggcaaatatgagtcctgtaatgataatgctttgatggtagcccagatctatagcaatctcggcaggcatccaagatctgaagagcaactcttccacaagcactacaaatgtcgcagctgtaaatcctctaattatcagcagaagaaattgcccacatcccttaagccacttcatggcatcaaaagaatgtggaaaatatggtggccgagaaagaaacgcagctcctgatattgcatttatgaactgaattagtagaacgaccgtgatgccccctgcaaaggcctttaaaaactcttgaatctgcaaggaatgaacttacagtatcatttctactgtcttaatagcctgaatgtatggaagtgaagagaataagaacatgtgaaattaagggaaaagaaaaatcacaactaagccatctcctgttgctgtttgaaaaacgtccaccaagttcttagttgaataaggttagtctagtggctaatgaagtattgacggtcgagaaattttcttcagcagtgcaacgaaaaccaaactattctaatattctaatctccgtgttacattaaaggttttaccttttctttgtttgatgcctttaaatcaagcccatattgcttgaatgggttttcgtacttccgtactctctttccccacagcataacaagaatgaatacagcaacatagagaccgactacactagctagttctgccactctagaaggattacttgtagaccagttctggagaagtgttggaagcaatggaatcacaaccggtgaccataaaacgagcaccatgccaataaagcccacagccctaataaacagcaaaaaaaaatatgatacgaaaattattagaacaagctagtctgaagaagaatcaaaggaccctacttataatactaaaatcacaaaagtatggaatctttaatatgattgttatcagaagagaatctaacattttataaacgaggaatttactagcaaacatgtactgaaaaatgtagaattttgagaatggggaatttactcgtaaacctgcagtgacgaacgttagttctcatatctctctttgattttaaggaaatagttaacacacatccatagtgtagcattcatttcatttaagagccaagtaaaccacataaattgatttagtgaaaaacattccgtcaacggtagtaaaaattaatagtaatacaaatatgaatatcaacggaaaatgttcataagagactacttcaaaatcaatcacataagttccatgatattggaaagaatctacaaaaatgcttagagagaaagcaacttacctcttgagcaagggccactcatccatgtgcaaaaactggattagcctatcagttaaactcatagcaccccgaaggccaccccaaagcagagcaagttttccaactaaactcaatatgccacccctctgacccaagtctgccaacattgccacaatcctgttcacatgaaaaccaagggatttcagattaaaaagaatcttagggcactgatagataagaattgacttattcactatgaatacctatcctgatccacttcaccagtttcctttgtcggaacagcaggaccagctatggacatagctttctcagcaaaacttcccaccatactactctgatcaagttgtccagattctttctgttgactatctttatccgatgattttgacatgatgccacctctttgtggatcctgtgcaggaagcactgattacaaggacgaacatatttgtatgctcttttgattatacattcatttgaatgctaatgttaagtcaatacctcgtgttgaaccagcatagcagatgctcccaaagcagctgttacagcaccaaccatagcacttttattgttaatactttgcaagccagattccaccatttctccaatgctcgagttgttttgtttggtctccttgctcactttgtctggcaaaacactcgccattgcaccattgttctcgtacttttgtcttctacccgggacaacatctctcttagcattgttggttgttgtagatacatcgaaatattttctcagagcagctaaaacagagccaacaacaacaccaattggcagtacttgtctgagaaaatgcgcctcctggacagcagatgcaattgccctaatgatagcgtccccacgaagtttacctacttttccagcagggacattggaagttttgctattccttttgaaagtccaagtaggctctgagtatacaacagcataagaaaatgtctttgccaccttttttatatctcgactgagttgagactcaatttgcctcatgccagctgaacccatcctgcgctgaatttctacattcaaagagtctgatacaataacattaatgaggtgctctaattcctcacatccttcgtctaatttgtgaggaccatcattttgattgtctgctgcatcatgcattccagagagctccaactcttgttcatggtccactatcacatatgaaggctcaatggtctcttcattatctacactaagggaatgaacctgtacattatcgtgtgtatttctgctggctgctgcattgtcagcaacgttacccaagtattctggttgttgatctagtagcttccatttaccttcctctgggtaatagtcatcatccaagcgttttggttgctgatcaaggagtttccatttaccttcctctggataatagtcaagcatgagagcagtggttgtatctaaatctaactgttttgcaatcttttcctttgaaagttcctccccaaggtatccatcatgagaagaattttcgatagaatctgtttttctttctggcagaatcttcggtgaatgcttaccaatcacaaattcatctctgcccaattgtttttcaatcactacccctgttaccttatcattgtcagaacatttttcagtttcactcacactgcatgcaggatcacgtgattttgcagagggcataaggcttttggtttctctcttgtagggaatttcctcttcagatggagacactacctcattcgtgacattcttcgcatccttgagattcttctcatccttgagattcttctcatcacttacctcatttccttcttttttttcttcatccagctgagaaatcatgttttcgagcacaccgaaaacactattgacagctacctgggttgaatcatccatccctgtcaatgcctcaaatgcttgggacacattaaaattgggctgatttggttcctgaattgctggcttagtttggtctgatacaggctgcataactttggtttctttgctctgatcattactttcatctttctctacaggctgtgaagcagaagattttccagcatctccttcattgtcggtagatgtcaccttgttttgatctgtggcagactgttttgcattctcatcacttttactagtttcatcctttctttgttgttgagctagtacaacaccttggtccactttgtccccatcactagttatatcgtctgccccaactggctgtgggttggtactatcattctttgcatctgaagccttctcgaaaccatcagctacactggatttttcattggcaattggagctcctttctcatcgtttttactagtttctacctgtccttgatgtgtagctactccagaaccttgctccactttgtcatcattattagtgaccgcctctgcaccaattggcccctggttagcactatcactttttgcttcggaagccatctcagaatcatcagctgcactggtcttttcattagtatgtgactcgtgatttccaggactatcatcttgatcattgtcaacgggttgggactttccagaatcactgtttctctgagaaacctttgaaggggaatgctctagttctactccacctggagaattatccgagccactaatagtttcatctgagccactcaccaaaccatcgctcttatctttcggatcaggagaataagaatcactttgacctatggcacttgatgtttctttcttttcttcctccgctttctttaatcctggtgctatactaggaagcttaagattttcaagatttaatttagtgccacctgactgcaagatcccagttacagctgttgtaagcttctcacgaacgtcttctggcacagcatcttgcagtgctgttagtactgtctctccccgaccaacagcatccataacctaaacatttactgaataattgtcaagcaattgttaatgcagcgaccacagtaaaacttgtaaaaattatttgtactttgatatggtgggtgttacctttttcttctcttcagcttttagggtcccaggcatggttacatctagcatgctcacaacaacttctgcagtctgcaacacctgccctctatcactttcttctacgttggactcattatcttcgattgattcaactcttgtggaaactatattattttctgtttcatcagatccataatcgattttgacattcttttctaaatctgtttcaggcgacaaattcgagtttggggtcatgtcactgtcttcaagtgtttccctgaaaggatctagatggtaaccattcaccgtcttttcatgggctgcctgtaccagcttcttggcaccgatacttttttcaggtgctctggcttccgaaaaaactaatccctttgaagggttaacagtaacatccacgtcttccaaaagtggatgacgacctttcagaagcccaagttctacagcagtcaaccactgcatggccaacataggaaaatcaatctctccgacataaaaagaaacgtaaacaagaatttttttcatgtaagatagaaggacttgcatattatttgcattaaaaccagtaaactaacaaaaagtttatactaacgactaacttaaaaaatcatcaatttctaacaccatgaccgtaataatgagcatcttggatatagagagtaccatgcctgtcttttatctattcagtagtgacgagaatctaagttccaccaaggtggaattgactaataatcactgattcttagataacttttcaagtataattcataacatttgtgagtatttgtgactatgtttgtgtgaaagagagaaatataggaagagaaacttgcctcactagcaaggtcctggcaccaagacacggccactgtacgtccatcgatcagatttggtgaagaagagcacagaagcaggcttgtaaatgggttttcagctattgaacttcgtggtattgtataaggtggtactacatcgtcattctgacaagacaggcaacttccagagtcaaaatacgtacaacactgttcacaaaagtcattcaagagaccagtatctgactatctaaatatttacatgtaaattgaaatctgatttaagtttacaaatcaggtcatatagaaaggtataaccttacacatttttgcatagccgaatattcacctgtataaagaggagaggaacttttacttccccaatcacctctctggtggcacaactggaatagaaatcttctatactctcgcaaccatatgtcaccatggacaaggctttatcaaattcgcgaactgactttgaacacagagcctttccaacatcaaatgcttttgctctgccttgaaaaagctcctagaaagtgtatccatatgcatatcccagtcaatataaaaagaactcactctaaatgagttcataaatcattattgttgcgttttataagcaatacccaaccttgtttgccagcagtatctcaactaatccccttgtaagctgttgatccaaactagtagaatacggagatgtccgtgtgatctcctcaaggtcaaagggattatcaatgcatacagcagctgtaagaggcgttctttcccctgcttccgcaagatatttcgtcaacatatttgcaccatatcctctgccaacggccgtaagtgtcgtccatggccttgtcttgcttaagaatcgcaaagcagtggatatatcatcactatcaccagctgtaaacaacctacaattcaggtgatcaaaatagattcaagataaggaactcttagagtatctacaacaaagattagtgttagctctcaccgaggtgtagtgagaggcgaaccagcacagcctctagggttcataaccacaggaaacacgcctcgcctcagagcttcgcatacaaacgatctaacgccttcttccatactgccttccggcgttcccgggatgaaaaccaccgttgtatccaatccacgctcctccctaatgtccaaattagcaggccaatctagcgagacaactccaccatcctccatagtgatacaaaccctctgatactccaacggagtcttctcatccgtaacagcaccgtctcttacaatcttcccactatccaaagtaacgaaatgcctctcctctgtgacaagtctatcgcttaaactcttctcagagtcatcatcaaaggagagcaaagaacaacgaagaagaacaaatctgttaaacggcgtcggagtggtgaaaagaatccattccccaacaacaacatcatcaacgattttatcactaatcttctccaaagactttccaaaaaacctcgacgataaataaacggctaagccggaagcgattccggcgagagatggagctaaggaggaatcgagaggaacgctgccatcgaaaggcggagggaaaattgacgaattcacaagaactaaattccgactctgtcgtttaaaacgagctcctcgcttcctgctacggcggagtataaatggagacgcggtggttattctcgccggtggaaattgaagaaaaatagaagaagaggacgacgacgagtacatcttgaatttcaaaagcagaaatttttctgggaagtagacataagagaggaacaagcaattgtgaatcttccgaatttgttgaagataataagtttgtttgtgaagaagaatacactcgattccaacattgtagagttttttaatttttgttgggagtaaacaacgatgttaaataggacacgcacattgttaaacaaaaaaaaagaaaaggacacgcacattgtcaaatgtaccaactttaaatgggctcatatagcccattagtgtaagtgcttgaaacagagaagctgaatatttttgatgggaaataaaagttcaagatttgacttgagatagcaaccaaagatggtagaaggaaatgaacaatcacactgttttagtaaactaattggtcgggtcatgtggatatggcaacggatcctcctaggcctaagttcggagatgtaaatattgacatctccaagtgagaatatttcacttcttggtaaaatctattgttatatgtcttttaactttcaacacgcaaacaaagtgttggaggtttgttttttttggtatgtccctagttttgtaacctttgtgtttaggtacaatgacatttttctgtgtttgctacattttttcagtttctaatcttgcatatcttgcaagatcttgatatcaacacaaattagttgtgctgtggagtcaggccaaataaatgagcaaagtaagagaactctcactggagatcattaaagccatggaataacaacaaagttcccaaatttatcgattattattatgccaagaagaaggacttgcgatacatgttaaacaagcaaagatacattggtttagttaatctctttataaaaaaaaaacattagcaatgagaaagcctaattgagctaataagctcttattaacggtatcatcatccatcagcttattagatggaacaaactgttccaaaacagacttggaatatcactcactctagtctgtaaaacagcttcagcaccaagtgcattcaacttctcaacgacctcctctccttcttcttttgaaagtcctgttttcaaaaccgtaggagccttcaccaccaatttcatagcttccttaagacccacaccaatgattctccttacctccttaatgatcttgattttcgcacgtgcctcgaaagactcaagtttaacctcaaacacagtcttctccgctttagctccctcattggcaccaccaccactttggccgtccctcagtactctcattttgtttgatctttgatacgtgcttgttccttggctttagctctagacctaatcacaaacttaaaccccaaacctactctctttttttttaacattaagatttttctctacatttttattcaacttacatatacgttatatattattaaacacacaacttgctctccaagcaataattgtactagatgtcagaaaaaaaaaaaaaaaaaacattaagtgtagagtttctatctagcttttttttgtctccaaatagctccccaagcaaaaatgtccctttctcagcacagattatgttcataactttatcatcatcatgtgctattctttgcctctcactgttcatatccttaccacgttgtctacaatagctaaaaagctcatatttcgaattctgttcgaaatgatatataacttccagtctcctaacgaatttaacataaaacagaaagaaaagtcaaagaaaatttgttgtaacttatagtaacttacacaagtcttggccaaaagaaagtttgaaaatctaaaaaaacaaaaaaggggttagaagggactgattgatgatcatttggaaacaaaattgttttccttcttgttccatatattaagacacatttatgtgtatatatttctcctctgcccttctttctcgatttttcctcattcatcatgagctttattaacctcctcactagtctttgattcatcagtcgttgcttcctctgtctttgattcatcaaacgccaacaactgcaacagcaacaaaacaaagaagaagaagaagaccataagctcactaatcctttacatcttaatctacaaccaaaaacacgataagcaaacagaaggtaacaggaaggttcttctgtttgggttgcataattgcgtttacaacaatagatacatcgaaatctagaaggactagaaaacaaaccggtttgatgtcaccgttccaaatgcagtgagaagccaagaacccaattacggctgggacaatgtataacaaagcaggctgaaacaaaggcaaaacaaaaacaaaaacctatcagagagaaatcccaaaataaggttgcaataaatagatgacaacaattaagacacaaaaactgacctgtgctgcttgaaaccagttcatgactacaatcgtgaggatcacaccaacagcgtatccgataaatgcacttgtgaagtattgtggttgtctacgtcttgacacatcaaatcttagagctagtgcaacgaaaatacctaaaggaaaacaaaaattaatatcttatattcatatcatatccaaaaatatgattcaagaatgcataaccataagctgaatatagctattgggttaagcattagagaacatacccggaatgacaatgtcaccaagaccaagcatagaatagggtcttagagcatcacccgtagggaataagagctgaaagaaatatgtaacaatgagattactgaaaaattgactaagaacaaatcagaatcaatttggtatggtgtgtacttttgaggcatttttactaaccttaattggagcatcgaaggatttggcaacactaaccataactggagtaaagaaaacccagaagatatcatagaaaaatagtcctgcctgcaagtcaagcataacaaacaccgaatgattgagtcattttcaaacgaattttcttttcatctagaagtccaaacaagttttcaagaatagcattcaaaagatgcagttcttaccaaaaggatggcaccagtcttgaatgatccgagagagagcatctcaattccctgtattggcaacggcattaattagtaaaaaaagagacactcaacaacagtgactccagttcactttaaacttaaatattatgttataacagtgaagcttcagagtttatgtattcccataaagtgcaagggaagtaacctgaatgcagaaggaaaggccgaggatattgttagccagccaatgttttttccacgcataccacgcacagaagaatgttccagggattcccgcaacaacttgggactttgtgaactctacctccaaagctgtttagtaaaaaggtgttagacatcaaagaaaataagcacatctcaaccagaaggatagaacaataactggatagagtaagaaaagtaaaaacagatttgaaaatgagacaaacacctaggatcttgaatgatcattacatcaaccaaataagtattcaaagactagcactaagcaaacgataacaaacaaacccataacttatataatgagaaaaatggctaccaaagaatactgaaggtaatcttagttacgtacacttgaaataaggaaaacgccagacgataagattgtcattccaaggatttggtaaaaatcttctgatggctggtaacaatgtcgctctgcaaacacacataaccgtgtcatgacttgaccacagataaacaaataaaaaaacaaaaggcatgatttagataagacatacgaaagagcgacaatcccaagaacaaagaagtaagctgttagcacagcattaaccaagtcctttgagagaaacttgaacaataagaaaagtgagagaagcatagcactcccaaccaatgggaaacgcatggcatgttcttttgacatcgtctcctacaccatttcaaaccaaagaaacaatttagatcgaatttggaaaattgtttcactaataaaaaaaaacaatctgattgcgtctttgtcttaccgttggaggagtatccttgaccgaacgaaagcaacccacataaacagtgatacatgctgtgagaataacattcaaatttggatttactctcacaacgagtggtgccaatgtcaaacctgtaaccaaaacaaaaacaaaaaccactcagttttgaatctttacaccataatcaaaaacaatcaatcacacccatcaagcctaaaccctagagaaaccaaactgatctaaaacgaacaaaaaaataaatattttccagcaaattctaagaacaaacctaaaaccgaaaaagttaacaaattcgaagcctaaatcacaatcagaagaaacccataacgcgaaacaatcacatgatcgtaaaaatcgatcgaaaattgaaattcacgagacgaattgtaacaattgtaagagtgaaagagagaaaaacctgcgagagcgagattagcaaatctctcacaattcttcataattgcttcttgtgtttcgtttttactctattactcagatgaatgtgtatatagagagatccagtggtggtcaaaagataaaatttccaccagatctgttaaaaaaaaaaagatgaagaagaagaagaagagaaagagaagagttaaggaaagaaaattaagatactcgaagaccacgaaagttacgggactgtgacctaattacgtgacagacttatttcattggtaacgctcacgtgtctatgacattacgttcgcattttaattggttgattattgcattcatcaccacatcacacatgcatatctgttttcttttatggttagtcaatacaatggtaaccgatacttttctccttcaacggataacaaaactggaaacatataaatcaatgtcaaaaattcgctaaagacctaataaataatcaatgtaaaagtattatattgtatagtttttagtattttttttctcttttagtaagtttttacacacaaaaaaacaaaatattagtgtgacatctaaacaaaatttgacttatggaagtacagtaaacggaaagaaaagaagggagccgattatatgtgactctttccactggtcttggtccatttgattaaaatacatgaaaatcaactatacttttaagtggatcataccattggaacaattggctgcaagttagacacacttagtagcaaagacgcgtccgagttcataacagtgctttggaaccactaatgatgaacaagattactcaaatatagttaaatacgaatacgaaaaatgaaagaaacattgtattctttcatgaagatgacaaaaacaaaaaaatatatatatcattcttttaagaacttcctgcatttgtagattcttgaggcgcaaaactactcgaatcctcttttttcttggattccaaaaaaacgcccaagtattttataaaaagtatattccagaatctaagtgtttagaacatagaaagataaccttttgacatggtttggtgatcaataaactcggtttcttattggggaatttacgttctgcaaaagaagaaaatagacagacatcatcaaaaatgaatctctatgagtaaatttggttaccagaatcatatatttttttatgacaatcataccatttgaccatagtcttcattcctagcaaattcctctgaaccatgaggatggttctcgccttttctgtgcctagacttgctcgaagtctatattgtttgagaaatataaggaaataaagttggaagcaagacaagaccacgatccatgtcaaatacattggctcttaaacgcagcatcacttgtgtaagagctttgattgctgcatcaagacttcctgttatctaaaaccacaagataaagaaacattgtttaagggtctctttcaaacacacaaaatcgacaagcactaggcaataaagggtggtcatgatttattacttggaccatctcctcattctcacgagcaatttttatgagaggtcgttactgcaggattcatcagaattctaccaggttgatgttgcagtgtactactagaggaagacagaaagtagttctaaaatcgtgacggattattataaagcagaaaggcaacttggtaaagagcttctctaacagcagaaggatctccaattatctgaaagtcaaccaacaacaacattcataagctaaatccgaaacacaaccacacacactaactcaaatctcgaagacattacctgaagaagctcatcatgactcaatgccaaagcacacatgggtagattatcatttctaacacgaatctgagcattagtgtcattacgcagcgtttgaataattggtccacctttgccaataagataaccaatttgatcagaaggcacaagcatcctcacagtaacaactgtttgtccctcactatactcatcattgtcattataatcatcatcatcgtcaaattcttcaacaacaaccatatcatgaaccttgaaaagagcatcaaaagcaggacagacaaaatcctcattgtcatcttcaatacgatttctctcctcgctattagaatatatagtcacaacacgctcatcacaaccaggcaatgcctcgtttaccctcatgtttgctttagtctcagacctaatctattttgcaatctcaccacctctcccaagaactccctgctcttctcacaagacacaagtaacgatacacagtatcttctaatccagcaccattattatctgtatcatcagaaaaaaactctcttacctcttatcaaatatgaaaactaactaaaacaagatctcttaccataattgttccttgaatgagccattttagcaacgatttagtgaaacaagttctgaaatcacaaagccagaggacgctgaagaacatacgaaacagaaaattagggtttaagttaggtttcaaataagcaacagaaacaaacattcataacaccaaaatccttcttcgtttctctatagatagattatgtaaagctcacatcaagaaacctaatcaacgaagatcaatacgaaaatcaattctcacgcaaccaaccgatcgataaatcttgatagtacttgaacattgcttagaaaacggaaaactcgaaaacagtaaactgttaccagagaatgaaacaaccgatgatcggtgaatccgtccgaagaagcgtcgtctcgccggaaaatgcaacggcctctctccgtctttttctttctgtggtttttggaatttgaaattgaaaagagtagtgaaagatgaagaaagtctttgggctcattaacgtctataggaatctaaaaggcctagcaagggcttttcaaatttttcttgcgtcgtgacaacacgtagccacattataaaataaagcgatattaatgtcaaatttactatttgaattgatgctatatggtatatatatttgaattgatgctatgtggtatatatatgttttctattaatgaagggaaaatagctaaaatcaactcacactattttccgacagttttttatacccaaactacgatatttgaaaaatatcaacctaaactcactaaaaaaattaaattttcaacctaaactatatgaaaatagtcaaaatcaacatatgccaaaacagtgttaatcaatcacttacggcgatgagtcagccgacattgtggcaataacggggcatcgtagatgagtaattatacgactttatttcgtgagtttagggttctcaaatcaaagaatcgctaaagcaatcgccaaagagtctttgattcgagaaccctaaactcacgaaacgacattgttttactcaacttcgatgcgtcgtcattgccatggtattggttgactcaacgctttatgctgttaactaacaccattttagcatatgtggattttggctatttttatatagtctagcctgaatttttagtgagtttaggttgatatttactaggtattgtagtttaggtatgaaaaaaccgccaacaaatattctaggttgattttgaccatttgtaaggggatagtccgggttacacccgatctatactgaacgatagaatgtttaagttagttaaccataagctaatatcaaatgaattattacattttaaatatgaatagaagtaaattagattttccagaaacaaattaccagattcttgaatttaaaagtagaaatcatatgtttgtagttgtatgttaagaaaaaattatcgattaattccctaagaagatactaatactcttaataattttaagagataagttggagagtaggcactttttgcaaaagtaatttgaggaatgggtactttttttagaaataggaagaatgagtacttttatctcttttctctaatagaactcctcttctaatacagtttttagtaaagtacaattttactcttctgttgttttgatgaaataaattgggcctcactaaaagcagctcaataacatctccaatttcgaattgctcatgagcttgatatcaactaaaacccatattttctttcaatcattgtatacattttaaaatactaatctttttatttattgtaaagattttaattttgttacattttgcggatatgtaatattataacattttactatactaacattttcaattttaatacattttaaaatattaattttgttatatttagctaaactaaatttaatagtaaaatactaagattttaattttactattgcgggtatgtaacatctttaaatcgtctatcgtacaccttcaaaaatattgtacacgaatctagagaactatttggcatacttgaaagtctatgagatagtgtacaaacatcagtgtacgaaatgatgtacaccaataaattgaaataataggttatatatttaaaaatattgtacaccgaatctataaaatcgagaataatttggtgtatttgaaagtttttgaaatagtgtacaaatccagtgtacaaaatgatgtacaccagtaaattaaaataatggtttatacatttcctattagtataccctaaatgttgtacgttatgtctaccaatttcacacgctgtcatttaaaattgtgtacatcattctgtcacaaatctcgtatatcataatattgtacaccaacatgtacaccattaagtttaattatattaaatcatttaaaattgtgtacaccatcctgtcaccaatatcatgattttaatggtgtacaccattccgtattccattaaaaattgtgtacaccataggattttccaaaattttgttttaatcgacaaaagtgatataatgttaaatttaaccgttggaagaaatgaactgaaaaaacaaaaacgattggaattttttttggggccaaataacatgttaaattaattgggctatgaaaatagtatttgatccattatctttaaaagatttgggcctattccaaaagttatttctcacaacacaaaagggtacaattgtatttaacacttattttgtttttcagtcatataccttctatctcacatattttctatctcacaatagcaaaagaagtatctatttctctaatatgtaaaaaaaactacctacttctcaaataacttttgaaaaagtgtctagtttgctaataaaccctaattttaattgtttgtttagtgaattaagcatatgacatgatatatccttctagtacgccactcctacatacttagttacttatttcctctgatcataatcttatccatgactgataatgcaaactcaagaatcatcatttacaccttacatcatcctcatcataaccatcaactcctctgcttctctttcctaatgttaccacttgaaacgtcaacaatatataatataggtgatagcctgaaaataaattggattagaagttcaaagactattgaaacactataagcttaaagtataatctgtttgtctaggaatgaaatctattggtagtttgtatacttgaagatgaatgacccgcacaatgatcatctctttccaactctagaaagacaaagatgagagacatatatgctagagattcatttataaaaacaggaaactaagaagtagcaacatatggttacatgtttacaatggatcaattatgagattggtactagaaagtgatgggtattgtctaattaggcatttcttatagtctttgtggagtatggcacttctctctctcaaacatgactgttttaccttgtcactcctaaattctaaattgaagtagatcggagttcctgcgtttgttgcgtccaaacatcatcttccacctcacaaaatccaaacaaatctcattacaactctctctctctctctctcgatctctctctctcttcctaacaaagtataatagagaaggaaaggattacctcttcgaaatttgttaattgtttagatttttttcatcaaaaatcgtttaatttgattgatcgagttaatcggagaagacgtgttggtagcggtgagagttggaaatgaaagagatagtgttttgatggaattaaaagtgacggtgttgacaaatatggcgtccatgaagcaagtgcagcagtgagaaatgagtgagggaaatttttgttgcagggaaatttgttgaagacgatgaagtatcgttatcatttatcaaaaccatgaactgaagcgaaggcaaactggtcaaatcccttgcttaatatatgcctattttcatgagcccatcctaaaagttctctttctctagttattgggccataatgtgcccattcttatgaaagcccctatttacaataccagaatcctgagaaaagtataaattgagaggatttcatcttcagttgtgatagaattagagaggaatttgagaaagagagaacaaacttttttttttaacaaacaaatatatgaaagtagttccatagaaaaacatctttgtctttgaatctcaaagtttacaatggtcttaatcctaaagttaaacgggagcaccctcttttgatttttttctttttgatctttgtagaatcacaacaccacttccttaaagcatgtgaatgaaatcaccatatatatatatatacgtaaacgtgtcatgaaaatctacttaattttggttagaagtttatttctagcctatttggaattctaatagtaaagttaggtatatatgaatcaagagttgaaaagcaaaaaacataagaaattttcatgtagagcattagacaatatttggaaacgtaagagttaatctcaaggagttaaatcagattttgacgacgatatttgactaaccaagattcgtaaaccaaacaacaccggtatgacctccttgaatgttccatagcatcatcgtctcatgttcacgtcaattacatcatggatttgacactctttcctcgtcgttaatttagagaattgtcttacaaacctcttcgccaacaaaactttggacgattgaatttccgaaattgttgatttagggagtaaagctatttgattcattttttgttcaatggagggatccgaagtataaacctaaatagtatatgtagaataaggtgatgggcacctctataacttcgtgcagaaataatgtcaaaatatttcaaagaaaaaaatatcaaacgaacaatcataataagagaaaaacatttacaaaaattttaacaagaaatcaagatatactttacaaaaaattataatagtgagatataactcacataagcatttattaacatttttataattattagaaaacatcattgtgaaaagagtgggagttgacacaagttaaaaaaaaaacattatgataagtatacgtatagtttcttgattaaaaaacacaaacaaaacatgagaaaaaaatataactccaaatgaacatatgtaactttaattaatgcacagaaaaacacttttatagagtagaaatgttacaaagctttatcaataaaaaccaaaaaatgtaatagttcatcaaattagctaaagattgctacagttaatcaaatataccaaatattgcaacagttaatcaaataacccaaaagttacaacgattcatcaaataagttcaaatgtttaatggtttgtcaaaataaaccaaatttttagtggatttccgagaatatctcggcgagacgtagggattcaagtttgaatcctgaactcgttaattcctgtgtgttcttactttcaagttccgctttttacaaacgagtgaacaacagagtgagttgagaggtctgagattagacaaagtacaactcgataacgttctaatcctcacagtttggtatcagagcttccaggttactacctaggagcgagaagatctgctcaagatgtcttcgggcagagcagaggtggagaagttcgacggagatggggattacatcctgtggaaagaaaagttactggctcatatggagatgttgggacttctggagggtctcggggaagaagaggaagcagaggttgaagattctaccactgagattagtgatggaggaaaccaagacccagaaactgcaacttctaaactggaagacaagatcctcaaagaaaaaagaggaaaagccagatctaccatcatcttgagcctgggaaacaatgttctgagaaaggtcatcaaacagaagacagcagcaggtatgataaaggtcctggatcagttatttatggcaaaatctcttccaaatcgcatttacttgaagcagaggctgtatggctacaagatgagtgagaatatgacgatggaggagaatgttaatgatttcttcaagttaatatcggacttggaaaacgtaaaggttgtagtcccagatgaagatcaagccatagtcttgctcatgtctttaccaagacagtttgatcaactgaaggagacactgaagtactgcaagactacacttcatctcgaagaaatcacaagtgccataaggtctaagatcttggagttgggagctagtggtaagcttctcaagaataactcagatgggttgtttgttcaagacagaggcagatcagaaaccagggggaaaggaccgaacaagaacaagagcagatctaagtcaaagggagcaggaaaaacgtgttggatctgtggcaaggagggtcatttcaagaagcaatgctatgtatggaaggagaggaacaagcaaggttccacatctgaaagaggagaggcttctactgtaactgctcaagtcactaatgcagctacactagtagtttcaagagctttacttggctttgctgaagtcaccccagatacatggattctagacacagggtgttccttccatatgacctgcagaaaggattggatcatagacttcaaggagactgcaagcgggaaagtaaggatgggcaatgatacttattctgaagtgaaaggaattggggatgtcagaatcaagaatgaggatggatctactatcttgctcactgatgtcaggtacataccagaaatgtcaaagaacctcatctcacttggaactcttgaagataaaggctgctggttcgaatcgaataaaggtattttgactatttttaagaatgatcttactgtactaactggaaagaaagaaagtactttgtattttctcgagggaacgacacttgcaggtgaagccaatgtcatagacaaagaaaaggatgaaacaagtttatggtacagcaggcttggtcacattggtgcaaaagggctgcaggttttggtcagtaaaggtcatctggataagaacatgattaaagagttgcagttttgtgaagattgtgtgtatggaaaaacacgcagggttagctttggagctgcaaagcatgtcacaaaagataaactcgactatgtgcattctgatctatggggatcaccgaatgtaccattctccattgattgaaaaccaacaggacaagaagctcaagattctcagaacagataatgggctggagttctgtaaccaggagtttgattcattctgcagaaaagaaggagttataaggcacaggacatgtgcttacacaccacagcagaatggtgttgctgaaaggatgaacaggaccatcatgaacaaggtcagatgcatgttaagtgaatcagggttggggaaacagttctgggcagaagcagcgtctactgccgtgttcctcatcaacaaaagcccaagctcttcaatagagtttgatattcctgaagagaagtggactggtcatccaccagattacaagatactcaagaagtttggatcagtcgcttatattcattcagatcaaggaaagctgaatcctagagcaaagaaggggatttttctcggatatccagatggtgtaaagggattcaaagtgtggctgctagaagacaggaaatgtgtagtctctcgagacattgtttttcaagaaaatcagatgtacaaggaactgcagaagaatgatatgtctgaggaagaaaaacagctcactgaagtagaaaggactctcatagagctaaagaatttgtctgcagatgatgaaaatcagagtgaaggaggagataagtcaaaccaagaacaagcttcaacaacaagatctgcaagtgaagacaaacaagtagaggaaactgattctgatgatgattgtctagagaactatctactggccagggatagaattcgaagacagatcagagctccacagagattcgttgaggaagatgacagccttgttgggtttgcattaacaatgacagaagatggagaagtttattaaccagaaacctatgaagaagccatgagaagtccagaatgtgagaaatggaagcaagctaccatagaagaaatggactccatgaaaaagaatgacacatgggatgtcattgataagcttgaaggaaagagagttataggctgtaagtggatattcaagagaaaagcaggaattcccggagtagaaccaccaagatacaaagctaggcttgtcgccaaaggattttcacaaagagaaggcatagactatcaggagattttctcacctgtagtcaagcacgtgtcaatcaggtatcttttatccattgtggttcaatttgacatggaattagaacaacttgatgttaagactgcgtttttacatgggaatctggatgagtatatattgatgagtcagcctgaaggatatgaagatgaggacagcacagaaaaagtctgtttgttaaagaaatctcaagtaactagggagaccacagatccgagattggaagtcaagtaacactaagaagatgagttcagtgaactttataccaaggaggagttttgtgagttttggtctaaattcaccaagtatgagaaagactctattcggtatagagggttcgaagttcaaatgaaaagcaaggaagagataagagtttctgggtcgcttagagggttcactttatgcgccaagtttgagaaacaaaaggagatctcttcagctctctctcatgacatcacattgtcgagttcgtacaagcaacaagagcagacaaccagaatggcttcttcaatcaagccgcctaagagattgcagcaattcaggcccgtaattgcagctggagcacctgacttgtgtaaggttcaagcacgagcgtgtcgggtagctctagatccttctctttgtctctttaaaggagttggttgtgttgtgttgctttgtaaggggtgagagaagtttgtaacagagagagaaagttgtagaaccctaaaggctcaagataagagcaagttcttagtggatttccgagaatatctcggcgagacgtagggattcaagtttgaatcctgaactcgttaattcctgtgtgttcttactttcaagttccgctttttacaaacgagtgaacaacagagtgagttgagaggtctgagattagacaaagtacaactcgagaacgttctaatcctcacagtttggttacttgaatgtttttctaggtaagttatttagttgctggtttttaaaaaaacaccaaaatatagaagttttagttgggaaagtgtttcaacttgaaagttttcttttgatatttttccttttcattgtcatggctttttcttaagtttaaatgatctgcattgattttagagttatatcggccaaccttagttttcgatagtaaattttcctccaaccagagaattaacaggttaatatttgttccttaactttagctaattctttaagaaattgatttaataaaaaatgaaagtatcactaccaaaactatatataaactcactttgatatttttagattcatgttactctaaaataaaaataaaaaaaatgaatcatctcatagttttcatcatgtcattcctttcgatgtatttttgtttgaatgaagcagaatttttttgtgacgaaagcattttagcatttcaaaatgaactcaaacctgggagcattctcaaagtcaattgtatatccaaaagcgacaaaacggaagttagagatgtggcgttcatgaaaattacggaatggagattcaacgaaaatccgttcgatagaacaatatggaagtgtctcttatgacaaggtcctaacatgcaaaatcatcatatcttatggagagcatacagaggagggtctactcgacgatgtggtcagatacgtagatggattgctaaacttgatggaatttacttagaaggtaatttgacaccacgaaagcgcatgtttgattggtttaaagtctaatttgttttttggtaaaaaaaattttttttatcaaattagtatatataatgataagtaatcatataaaataaaaatgtattttcttacgatatgatttaatattggaaaaatatttatcagttacgtgaaatataagccaacacatcggcatacatgaaaactttaaaaatgtttcgtttgctacacgaaatatagtcatcacatacagatatacacgaacaaacataagtcatgttacatcataaccatcctactttgatgtttcgatcattagaatccggcgttgaccagtattgaccgatgttgaccaaataatatatttttttcatttctttttataaacaaataaaaataataataattacataattttcacaaaaactaataacaaaatatacaataaataatataacaaaataaattaaaaaatataattttttatttatttaatagatgggttgacatatacgtgtaataaaatatttgttcttttttgtcatcatttgttcattttaagctaatatttttaaatcaacatttaatatactatatattagtttcttttttacagatttaatatactatatatgtataaagttcggcatataataaattaactcttttcaatatcggtgaaactaaagatcagctagtcatgattagtcattacacttactaattcgatcaatgtaaatagcaacttgctactttattcttgttgaattttatttctgaaataagataaatacgaccaacttgataaatttaaatagtaaagcctgctaaatttactgtcggcagtggggctagtctcaagctcacagccacggacccatattgctgaattttatcagtctaattaattgtaatttctgatgaaagtttccaattgtttcacaatattgttgtactttacgattccgaatatattagtagttatagaaagtgagtctgaaatcttttttgctattttttttacggcagagtatgaaatatttgaaatcccaatattcatatttataatcacaatttctttaatcttttcttcttttgctaagcttcgaaaggatcacctcttttcaacattcataactatttctaaaatttcagtaaaaatattattgaggaaaagcgtttcaaaaatttgtttccgatttttaacaaaaaaaaaaaaagttgtttccgatagaagtaggaatagttctttttcgttatgttttgtctcgttactctcgtacttgttctcaaattctcgtctcatataaaaatgaatttcttagatagattaaattttagttttctatttctttatttttattattttatgttttgcttatctaaattggatatgttttttatttttttcaagtttaactattgttttctgtattttaatataatgatgttgtagaacaaaaaacatccaagtctaaagggtaaaattttgtatagatagttttttttttgtatagataagtgtttttggaactttaatagcattttcttaaagcacaaaacataaataatatacaatttggaaacatgatacttttatgatttcaagcttttactcgacatacatcgctttacccatgttatagtaggcaattaggcatctcttaggagtaggtgtcggctaatttacttttttccaacagcgtctgcattattcgtgttgaaatgttaccataataagaatactaattactaaaaatgcatgtcttagcaatccattactctttttattagtataaattataaataactaaactatacacttctacattttatagttttaaaggcctttgaattatatactatatgagttttttgggattttcggtaagggtttaaattctacgtaaattgattggtataaagcttttctgattttacagtaaaatatgaattttctgttggtttctatatatattaagaaaacagaaataaagaatttattagtggtaagaaaagttctgtttttctctaagatattgaaataagataaaattttaacctttgcaaatatatactccatctgtttcacgttaatgttactctaaggtttttgcaaagaccttgttaggatcattcaatttatttttaggtttacaacaagaggaaaaaaaaactcaacaaatataaccatttgtggtcttagtgtaaacttacaaggttttctctccaagcctccaccaacctgcgttataactacttaacaaaaacaaaaaaaaagaataagctagctaggatttacatacaaaaataaaaaatagtacattgtataaaaacaactcaaattggaatgtagatatctttcgaacaagcaatgttttatatgagttctttatcaaaaataaaaataaaatgtctttatgagttaagaagtaaccaactatgaatcttttgagatagctaaatagagtttgttagaaaatatttaattcctgttcatattttttcctaattcaatttgattacagtagaattgtcaacgtaaataaataaattaattaattaattaacaaagggtactaattaagagcagcattataattgaaacgatttgttaaccatataatcgacatctatgagtcaaatcagattaataatcgttctatgagtagagctagctagggacgggttcacaaaaagaaatagcataattcgatttcgttagattttttggttaccatgtcactttcggatttagtggaatatgattcgaatattttattttttgttaatgaattaatatgattcgaatgttataatcattaaaagggtaaattataatttatagttgactgatcttgtttttgcaaggaagtcagtctcgacattgactgatcttgggataaacatacaccgaaaacgattaaacctgaaaatattaataaacacatccgctaggaatgtagttaaatattacaaacagggaagatatgcatcttatcaagaaaaaatggtagagcctataatacaaagagataacctaaatggtttgattttaagtttaatcatatcttaagacgaccttagagtctcgtcgtatctctcgtgatacctaccttaagctt

SEQ ID NO: 159 - DNA, 89137 bp, Arabidopsis thaliana
aagctttcgatgatctttctcaaaatatcaggacaaagcttggaccaatcatgattctcagacattttttgtgtctcctctttcttcatcgaatcggttgtcatacccatgagtatacgtttaattgccgagcactctatggatctagggtttggtttttattaaggttcttagaaaatctgctactgatttaggaggtgttattgatttgtgatttaaatagagtattaatgagttaatatgttatggagaatctgttgttattcaatcaagatttttaaaaagtttgttaaagtttggtattattagtttaagatttataaaaactaatttaaaatctttataaatctagagttattgaatttatactttaataaagtcattaaaagttttgtgttattcaattaaaacaaaataatctatgatttttaatgagttaaattattgtgttattagtttatgactttctacatttttctttacaaaataaagttatgaaaaatatcatcaaaatatagagattgtttgaaaactttaaaagattgtgaaaaaataatcaacaagattatagaaaactctctaaggggttgtattcaatcaaacatttcaagtgatttgtgttaaaataacaaatcatatgctattcaatcatagatttttaaaagcctcataaaatctaatgttattgaactagtgattctaaaatctacttaaaaatcccttgttttttttttttttgtcatccgattataattaggactcaaacgagccaaaactgaggaatgttgtttacataagttatatgaaacggttcagtgcgaacttttcgcgctaagttatccgcttttacatttgcattacgagaaattaatgataaaaaaaagcatgggaattcttccctgtcgctctgtagttcctccaaaagtatgtgaatttacttaaaaatcccttgttattgaaaacattttaaggattgaatttgtagtgactttaagagacttaagtgaattttagttaatttccttagttaaaaatatagaattttaaatctcatggttttaggtggaatttgagaagattttacaataaatcataacaacttctttaaattcacccaaattcttcaaactcatataaaaactcaaaataactcaaatcactcaaaatataattggatataccccctaagaataatttagaatcttccatttctttattatctatgattttatcaaagtcatcaaaattcttggtaaattaggaaccaataacacccccttaatgtttttccttttttttgtttactaactattacaagcttaaatctttaaacttttcctattctatagagtatagaccatatctatgtatatataacgaaacagggaaactaactaaaattttttttaaaaacttttcctattctatatatacgtaaatataacgaaataggaaactaactaaaaataaatttacatttactaatttacatgtactgtatataagtttgcaccacataatattcaaaccaaaccatttatttaccacaaactaatacaattaatcgtctttctatcagttacttgaaagaaaagtaactgaaactttaactgactcctcttggctttaaccctaaatgtgatagcataattctatatgtaatcagtgacaaatacaccaatttattcattagttattgttatctccttcgacaaacgtactcattaatattacttattaataaactcttcaagtttcttcacgacttgacgagcattatcactattaggattcttcaaatgaaaaacatgaccttcatttttagtctccattacctcaacttcaccttcccatccactcttcttcagcttctccgcgtaacaccaaccttgtctcacaaacagatcatctccagctaccattaccaaaacccgcccgcaacctaatccggatggatccgatccgacaacgttgagccatggatcatcaactccttgtttactattcggacttgcgactctccaacttccttcaacacctttcgtcttccccacgtctctaacctcaaactcatcaattggagtcttactccaaaaatatggatgaatcaagattatccctgatattaaagaatcacaaagcttctcttttttcgctcgcatcgttagatgatgagatatgtttccaccggcgctatctccggcgagaaacacttttccgaaatcgccgtgtttgtttatccaagtttccggtccggttcctgtgatatgagttaacacccatttgagtgaatcccatgaatcttcgtacggaataggtaccggaaactccggtgcacggcgatagtttactgatattgctaagcagttagcggccgcgacggcggatgtgaggaaagtgtggtagggtggagaaaaagctgtttctatgatgaaaccaccaccgtggaagtagatgaggattgggagctttttaacagtgactttctccggtaggtagatgcggagggagaggtttttctccggtgaatggatgatatctttggagacgacaccgttttgtggtgtaagagatggtgggacggttgtttctcctaagagacgctcaatgcggccactcttgtagactcgaaacatcggagatctgtcgaaagcgattacggaatccatattgttgcttggattagagatagaaagaaacgttagagatgagtgaagacgatgagaagaagataagaagagtgtttttgtaagcgtagatgtagagcgtgaaagtgatgatggggtctctgctactaacaataattgaatgcaaatggttggactctaataagtctcctgactcatatggatgtgacaatgacatgacaattcgatgtcctcagtattatatggaggaaagcaaatcacatgttcaaatgaatcatggttatatatccattgagagcaaagcatggaatgggttttctttcacacaattggcattcaatgttttactagttttaagcggtcctctaggtctagaaaaattatttaatacttggttaaccaatggaccaaggtagtttttacaaagatttctaaaaaatgatttttttatttaaaattttgggaaactagttttctagtgatttctccaagtttctaaaagaaactaaaaaccatggttttgaggtttttatgaaaatctttatttttccaaggaaattatggttttgaatagttgtggttttcaaagtggttttaattcttccaaaattgctttttaaaccctttgaagattatgaaaaaaattgtttccctacaaaaatagagaatctagattttgagatcttttgccaaatcatatatatgaaagttggccaactctctccatatgattgacacatcatcactttagtatttgccatgtgtctattaaataattaataaaagctcttcaacttctaatttataggttaatgatatatttattatttaattttacatattatttatttttacatatttaaaaaaattgatattaaaaaaaatgatttttttttgtaatccaaactcaaagtatgagtatataataatcgtggattaattaatgatttgagtaggttattatcttaaattgatatttatataataaatctccgaaggtgcataatacgtacgaagcttcatcatcaaattcttagatttctagaatcgaagactaacttctgttaaattggtttaaagtgaacgttgtttatgaattatgtgtatgatgaaatattgagaatgttgttagaaaaaatatattttaatactaaaaataatttcttattgtattagtgaatgattagataaataaaattatttaaattaaacgatacaaaataatccgaaagactgcggcgtagcgcggatgatcacctagtaataataataagaaacatgcaaccacacgcaccatcccttctatttccggcattctcattaaaaggaaaggagtcacatgaaaatctaatgagtgtatcattcccttttcattgtgcttgttatttgcgctgtttaatcttatttcacaacaaatcatctagctatcttggttttgtttatttataattctaatctatttttgtcaaattcttattttttgttttgtctatggacggggatttatctgttaactgcattgaataggtaatggttgttaaatagagtagtccactaggcagcattgagccaaccgtaagtagaggcttcaaatacatatgtgatatctgtgtagaatataacatcaaaatgaattagattcgtagacatataaacacaagtgtcctcctagtttcaaagcatcacgtctatcacatcaatcacaaaatttaaaagcataattttatatattaaatttattgtgtcatactccaatgtaatcccgcaatcagatcactaaatttgacgatcttacagtaatccatctaatgttaaaatccgttggatcatattcatatatgttttttcgaaagaaaaaacaaaacaaatcaaatattgaataagtttataaaacaataataaatatccatataaaacagtatacacattcaagtattgctattatatatatagaaattattttctaaattattgaatgtaaaatatacagtaaacggtttgcatatattttagtctatattgttttagaagatagtgtgaaatctttaatataataaatttaaacttaacaataattttatttcactaaattgtttctttaatatagcaacaacgcattttcgaatttatcatatatgaatgcttaatatttattttttcacataaaactcaaatatctgtaaattatttatggatatcaattttggtttaaagaacgttatagatgtttgttgttttatgccattatacatgggatctgctatgcttcaatagtttgtaaaattaaataatgactttgaatgtatggaatatataatttttgtcattttaaataagagtaattaaatgcgaactgaaatatttttcaatggcaaataacatttggttattttgctaacaacattgcacaaataatagtatagagatcgtacatgtgggtggctacttctctttcttttcttttttttgttttttgaatttaatattaaattagattcaaaaagaaaacataacatttttacagtttgtgcaactatttttgatagtaagttaagaatttgaatgagaaatcataagaacttttctcagtttatccctcttgatgtgaaccatacttggagacccttgttatatcgatgatctccactgattttaagaaccgaaagttgattgcgaatgtgtcgatcaatccatttgataagtcgattagctgagttgagaccagtgccatgtttgcgctcgttacgttcccgccaaatggtatatatcgttgcctgcaacacgtatctagcaagtaagccatcgaccttgtcccgccactgattagaaacacaagtgatgatagaatgccagccagtccgttgagtagttcgatctgaaaagattcttggccagaggttcccatatttcttttgcatagccacatgaaaagaaaatgtgatctctggtttcaagctcatggttacataagacacacgttgcattgaccccgctattccattgaagcatcctatcccccgtggagagcctattgtgaaccgctaaccacatgcaaaacgcatgtttcggtgtagcttgcgcaaattagacccttttgtgccaagaaaccttgttcgccgttgtgcgtgtgtgattccaagtgtccttggtagacaacgttggccggaacacaccattctttcctttccagagtactctgtcttgctcattcgttctgctattccgtttcagagccaacatttcttccattgatctaagacagtccacacggtgccgtctccgtctacggtttgtccaagcctccaaaactgtcgacgttctgcttatccccatatcaatcatccctctatctccggtggctacttctctttcacctatatggaaattctaaagcgtgtgtcatcttcagagactttttggtcatttcatttttgataaaaagagtttatctcacgattgaaagttaaaaaaagtgacaaacaactattatctagactcatgacaagtgatacatgtaaactatattcattttatgaaaaatagacaaactaatttacatttttatatctattgagtttttactttctatgtccagaagaagccatgagaactgcaacagctgaaatgaacataaacaacatacagaagagaagtagataagttttccgtgacgatcttctgtattctccaaacaaaaccactccccaaaatgtactcacaagtggaagagcctataagacacaaaatactcaaaaccataaagattgattcttgaattttgccaaaatattttgaaagaaatgtgaatatatgaacctgaacggagtcagcagccgcgtatcctgcggcttgaccgcccataaactgaagaccgtttccaaaaccgcaaagaaaccccgccaaaaaggcccagtaacgaccattccagtcatttaagtaagctttaaaagaagattttggaagaccaagaacaggatagtagaggaatacaacgttgagtatcaatgcaatgataaaacaagaaacagagaagtagaagaatgctgtgtaaacgactagctttggcactccttgtttcaatctgttccattgatcgttagtggctaagttaaatgctggagagaagagggagaaacaaagacctgcgaagaaagtaatcgctagtccgattatctttcgttttccgaacacctgcaattttaaagaatgaattttaacaacttctcaaagtatatggacttgaagaaaccattacctttatggctcttgtgttctcaagctctataagaaatcttgctgtcccttctttaggttttgtcgtaacattagtctccaggtcttttgatgagtttgttcctatttcggtagatggacctgaagctctggatgagacaagattgggatattagtaagaaaacagattgtttaggaaaataaagtgagagactgaatcttgattactcttgcttagccgtttcaaagtctcttagcttggccttgttatcgtctgcattggatctatgaactgctgaaccaagacaaaccgcgatcaagaaacaggccacaccggggaaaaggatctcggctttgttgatcttatcatccaagaaatagttcaaggttgagcctgaaagttagaaaacaagaattgtaaactaaccactttcaaaccaaagtatataacttcatgatctaacctatgactacagtgatgcttgatgtgatgacttctgtaactgataagcctactaaagcccatgcatattgagttgatagattcccgaggctaagcacgataccgcccgccattgcaaacataacagacggccaattatcctacaaaataagtggtttctcaacaacaaattataactttctctttgcatgtatctccaaaagtgatttaagtatacttgagcaagctgagtgatgaagtttgggctatcgggttttgtagacccaatttgaccaaaagtgaaagctataataatagcagccaacaagttagtgatggagtaatcaagataggtgtgttgaggaagacggccacgtctctctaaaagtgttaaaactgctggccaagtccctagagatagtaaggctaaaagcatacaagctatggcacctcctttgctctccactagatacatattctcgggctctaaatggatcagccctgcaagcaaaaatgttggtttaggcaaaagatatgcttggagaatttcagaattatctaatccttaaaagcagataaacaatccacataagactagagaagattcttgattgtttctcatgttgatggaagatacatatgtccataaactattcatgacaagagagtttgagatttaaaagataagtagaaccaaatcatccaaaataggtatatgaaaaagacactacctttgctaggttctgcaagaacagaggataatatcacttctgcaaataagttcaagagagtttccaccacatatcttttagatcttttgtccagagaatgtaaagatactgaacattgactcaaattgatatacaaaatttttgatttgccttggaatcttcatagtgaggttccaatctttggatactttttgacctttctaatattttcgtttatactagagaaattaattctggaaaaagacaagtacctaacatttctttttctttctcctttctttcattgaatattcatttaagtagagacgaaacgaaaaaattatgtttctccaattagaatgaaaaaacataacatttttgaaacagaacatatattcttcattcacttataatcttacatgtataatacaactatgataagatcatcatttccggtgaccggaagaggccataagaatagctacggccgccacaaacatggccaacatgctaactaaaagggcataagttcgcttcgacgattttcgatactctccgaacaaaactataccccaaaatgtgcttacaagaggaagtgcctaaaccaaaaacagagctcatgtacttgcaaaaaccaaaatgtaaactttgagattactaaatttgaagaagcaaaaaataacctggacagagtctgcagccgcgtatccagcggcttgacctcccatgaactgcaaaccgttaccaaacccgcacaagaatccagcgaaaaccgcccaacctctacctttggagtcatatatatacttcttaagcgatgatctcgctaagcctaccattggccggtaaagaaagatgaggtttagaatcaaagaaatgagaaaacccgcgattgagaagtagaaaaaggcggtatagacaacgagcttaggtacgccttttggcaatgtactccattgatcgtttgttgccaagttgaatgcaggagagaatagagaaaggctgattcccgcgaacagcgttatgaatagtccgatcattatgctttttccaaagacctgcgcattgatgaggttttaagcaccgagagtagttgtatactctcctttgctacgtaatcttgctaaaggtttttctcttggtcattgtaattgaaccttgattgctcttttgttctctagctctacatagaatcctgccgtccctgctttcgccttttccgcgagtttctcttgagattcgacatcagttttctctgttcatggtaagaacaaacaagaaaacatcacaactttgatcaaagttccaccaaaagtttctaattttaactgaattttcattcctttgctttgcatatatcttcacacaaatcaatatatatataggttttacctatttcaggcttgtcttcaccattttcaatagaagaatataaatctctgaaaaagatcagagttttgttaaaacatttttaaaacatggaacaaaggcaaaagaaagagcaacatcttagtttgtctcagctttatactcgctaggtaaagacttgagtttctctttgacatcagctgcattagaagcatgaaccgcagcgcctaggaaaacagcgatcaagaagcaacctacgccagggaagaggatctcggctttgtttatcttgttgtccaagaaataattcaatgttgtacctataaaattcaaccgtgatacgcaagaaaccatagaaacataagtttttgattcatcacaaaccaaaggaagtataccaatgacgacggtaatgcttgcggttataacttcagtaaccgataaaccgacaaacgcaaaagcgtattgagtcgctaaattcccgatgctaagaagcacaccgcctgcgactgcaagcaataccgacggccaattatcctgtaaaaaacctcatattaccaatcaagttcgtataaactttatcaggaatctcaagaagtatatagaacgaaccaaacctgaggtagctgagtggtaaagtcaggttttagaaacgtgcttttcccaatctcaccgagcgaaaatgctatcacgattgcagccaagagattcgcggttgcgaaatcaagaaacgtgtgttgaggaagacgacctcttctctccaatagagtcagaatcgctggccaacttcccaaacaacacaatgagagtatcatacatcctatagctcctgctttgctctcaaccacatacatttctactcttcttctttaacacaaaaacactttcttttcttgtaacatttatggactttgcctcttacccggtttaccccaccgctttggatgcattctcggtttatctaaaccggatcttcttggacaatgtttggccaaccctgcatttcctctctctgtttttgcatgtgtgttgttgacggttgtatggagagggttacatgtgtatatcaaaagataatgtcaatgaaggatttcaagacacattcattttcagcctaataagaccaaaatgagctcagatatgtttggactttgaatctcaaactgacagagaatctcttagtcatttttaatattttgtggagcattgaatctgataaaatggctaaagtgttacaccgaattagcttagtcttaatgagatttctttttagacaaaaacatggttactaggagactgggttgcaactaaatgaaagctacgggagaagcttccaaatttcactgataagtgttttatgttatgcaataaaaacaaaagaaaatttgtttttgtgggactgaaacatctagtctatgtatcagtggccatttccaagcttccatctttgtcttttgtcgaatgattgaggaaattcccaagcagcctttgatccaacaccatgttaggtacctgcacagttaagagatatactttcttcagaacagcagaacagagataagacacgagatatgtgaattcagaaatgagatagagtcgagtaaaaccttgtccccgaagaatattttggtgttacgagcaatggcatcgatgaatttgagttcaagaaattcaggggtgagcttcaacttatttgcttcagcttctctcagtacactaaggacattgatcaggggaaaaatttaaacattagagccatttattctgtatatgttctttgtttgtttgattcataaggaaactaaatgggaaaaaaagacgggctattaccggtagtaatctgcatccgcgagactcttttgacggtcaaggtacatctgattctcgatatcagcttctctccttgaactgtctttctcagtcaacttctgttgcatcagaatcttgcttacattggcgttcttctcagcttcactaatggccattattttctttgtctctgcctctttctcagcaactctttgtttctcaatagcaatcaagaccttcaaaatcattcattccaattgtataagcaatcttaaagcgtccagagtccattataacggaattgatgatatgagcaaaccagtgcagattgaattgccaaggacaaggttcaaaaggaatttaccttggtacgttcctcttccatttgctcaaagttacgccttacactctctggaattttcggcttggtgacacgcacactaagaatctcaattcctggagcataacgtgtacaatcagcttgaagagcatctttcattcgttcatcaatctgaaacacatgtgatcaaatgaattagcggaaatcatcgtaaactttccagattttggacgcaattagaaaactatctaaagaaagctttaatcactgctgttttcctaaaaagaggaaggaaacgtcactccatatggatcaaaaacatgaaccagtcaatgacatgagcttaagcttccaaactgttaagatcaaaaagtttatatgtttaaattatagtcaagtacctggtcaaagatgtcaatgtagacttgctgaagtgaatgagagctacagaactggttgatctcatgatgaatcttgtcataaatccatgtgttatcatagttcacaccatagttaagcaaagtgtcataaacaaaatccttacgtagtcgattaacaacctgtaaacatgtttaatctgatcaatacatataattaagattaaaaaagcaatggtgatgccagcagaaaagcaaatcttaagacacttacttctatcttctcaaaggtaatcaagacacctcctttggtaccacatggtatatccctcacctaagagtagagaatcaattagtaaaaaaaactacaatctaaacacatccaagctttttatggtagaaaactcacttgatctgtctgtagagtaacttgaacaggctcatagttggttatgaaaggcagcttcagatgaaaacctgaaacacacaaaagttaattccaactaacaaaagaatgaaatcgcaatgaaactacgaaaagggatcataaatacctggctctgtgattatatttagaagagcaccacctctccaatacgctccaacgtgaccttcaggaacttggtgcaccaacgatgagggaaacataacctgatgatagtccattccataaacaaaatctttaacaaatacaacccaaagcgagtgtctttagagttttgtgtcactcaaataggttttaaaaaagtgtacttgtgacattacactacactaatccaaaatctaaaaagaaacaagtgaaatctaggtcgagaagaatacaaagtcatcagctttaagtcaacttcagatacaaagcttacacatttagaaaagggttgactcagaatcgaaagatgaaacatttaagagaaccgattcagtttgtgatgatacgtgtatctaatctgaacacagagatcaaacgagaagagaggagatatcataccaaggcggcgattgcagcgaaaacaccgaaagcaatgagaatcgaagatatatcgccaccgggttctccgaccggtggtgctcgaggaatatcagttctccgttgttgagcatccatggcgaattttgcttaaccgggaaagttttctgttcagtggaaattgcaaaacttggaaaggggttttttcaagatgaaggtttttttcatgtatagggttttataaggtgtgggagggaagagtttaacttcgtgtgtgtaattgatatcgaaccgttgaatagaggagaatcaatggatcgtatttttttagatgtgggagtaatcttccaaaatttatatttcattataactttttttttaaaacaaatcttcaaatattaaacaaatactatatttttccagtatcaaactaaataatttgtattagcttgttataaatatgaaaaaaatacaatagagattactagttaagtcttgaaaaaaaaaagaaaaaaatatatcttagacaagttagtaccaatttattacatacatatatatatatatatatatgtaaattaggattgaactaaaggtacatggtgggacaaaaggtttattttttgatagaaatcataaaataagttatattatacaatagtttatcatgaaaaagtatataattataatatgttttgtttttatatagatttttgttggtggaaacaattatttaaggaataataacaatgaaaacaacgatttgaatatcgaagataaaaacagtgataattctctaaatcttcgagataactaacatacggtgaaaacaacgctgatgatcttaaatcttgatgcaaatattgcaaatccgacccgtaaattttttcactctataggtttgatttatatgtgggcttattatgagtaaattactaaattgtgtgttaataagttttagtaaccttgattttttgatatagaaagtatttaggtgtacgttagtattagaatgtgggcttccaactcaaaatcaattgttaataagtggagagactcatatcttatatatatatcactttatattttactcaacttctaatgtgggacattatcctaaaacgtctctccgaaatgatggtttttctaaccactgatctcgatatgttcgggctttgatatcatattagattgtgggcttccaactcaaaataattggcaatgaatgaagattaaaatcatacttaacttccaatatgagagaatagccctaatagttagcacgtatatgtatgaaatctttggtcttgttttaaaaccgctaatctaatatttaaatttgatttgaggtttatatgttttttcaaacttaagatatagaacaacatgaataataagtttgtctctaatgattcaaagctggaatagatacaaaaaaaatatcaagtcaggttcatatcgaaataaaacttttgcctcaccagtcaccacaacatctcttagacataactctaccacttcctatatattgtttgcattctacttatgtttacatgttctatttactctgcatgtaaacacttatagaaagattccattagatcatttcttacatacatgaaataaaattaaaatagcctaaacaacaaagccaaccactaaatggatgtctgcctcaaagaacttgcattcacacgtgacaaaatctcatccatacatccaaaacgtcagcctcactttcttaatcactcactagccttttatagaaacgcaatgacgacggagaaaccaagtgagagagcgattgaaatgaacaaactcggagcaccattattgcctgaaggatcaaaatctccggccggaccaaacgcaggaggtcccggaaacgtctgtgttcctgaaggagtacctgtcgtgggagttgtccctgcacttctgtggaagacaaaacaggtaaaagaacaccaaacttctaagtcacgttacataaagaaagacaagttttaaccaaacaatctctttaccaaatcttgaaacaaacataccctggacttgaaggatataagcaaccagtaaccacagctgcaaaagaacagaggaaaacatcaaaaagattgcatcataacaccaacaaatttaggtttcagagattttggtttttacttgaaggaagattttggctggtagtagcagttcctgagaaattacagcttccagagatttgaccaaatctttggaaataagtattaaccgcccaatcacaatgactcttgatggtgtttggttgataacaaggacctttctcatgaataggattacaatcttttaaaactccacatgcataatctatcgatgtttgaagatctttctctccaacaccatctctacatagacaataagttgcacctagaaacagagaaagtgagagagagttggttttgtttgaaacctcaagaacagagaatcattttgaacaaaaagcttacttgagtaggtggttaaagccaagagaaacaagagactaagaagcaatctcatgatggaccaaagcaagtttttaactcctaaacacaatccaagaagatagcttcaaagacagaggagaagaagaagaagaagaagaagaagaagaagaagaagaagagatgagattttagatgagagagatatgagtttattaataaaagagagtgataaagaccataccatctctctctggttccgaggtttaaccacagacaagaatctgaaaatctcagtgtccaaactccaaaaatgtatatggtctcaacatttgtttttttctttttcttttttgttgctaaaaattgtaattatttcatttatcgtttggtacaatttaattattcttagtcaaaataaaagcagaaccaattaatagtcgtgatttcatcgtgagaccataatggtagtagactcaataaaagcaaatcaatatgttttagtgttcatctgataatgtacgaaggaaaatgaaagttgggaattgacaaattatagaaatttttgcataacctatgagttaatgctgacctggtcctctagtcctttgtggttggtgcacgatacattcgaagtttggtaattaaaaactttctatttgtatcagttaattcataattattttttcgtaggtagtggtgtcttttattttatacttaaaaacggtaattattaacccaagggtcaggtcaaaacttaacccaacattggttttgatggtttcttctgcagattctgttgtctcgatttgatcgtcgtttaacttttcatgctttgcaacgcttaatttctaaattactaattttagattagttggtcagtttgtcacatataatttatattagtttacaaatgaaaatttgaaatggacttgtttatgaaagtgttttcaagagatgtgaaaggtcaaaattcttttgtaagctgaattagccaccgatattgaatgagaatattcttattttgttaacttaaaagaagaagaaatagcgaataaagtttcgatttctttgtggccttttctagaaaatatatcttttatcaattatcattcttcatttaaaattattctgactaaactaaaacatgtttggagatgtaccaatcaagtttcaaaccaagatttacaccaacctaaatactgtctcataacaaaaatgattctaacaccttccaaatttttgacattcttttttcctaatttttttccatcaaatggttttttcttaggttgcaaatattagagtatataatatgattatgaaaaactaaatgcagaagtggtgcgtcgactagtttatgtaatgaaaataaagaatatcgctgacttttagagcaaaattccaaggaccaccactccatatctagcacatgaagatgcatcataccggccaatcaaatattcagatttgttgtggcgtttaatgcaatatttgtggacaaatagtagatagttaaaaccgaagaagactatacattgccaattactagaaaatttgccgcaataccaaagagattccaacaatctaattttaatgatggttttaattttaaacggcaagtcattttgacttgtgttatgatcgaacctaaatatatatacaatggaaacaacgattaaatcattaatttacatatagcatttagctgctcaaatgtttaacatcactacaattttcatatatatcattgataacacaaacaaaggccatatgaattaatcaatttacacatagttaacgcctacacaagttcatatgatcaatccacattatccattcatataatcaaccaactaaagtaaacacagacacgatagtccctttgagattaccagtttgaatacatgtttttatctaacgataagagtaacatgatcaaaatgaattttctaagtgatgatatgatattcataatgttcgataaaaacattcgctgcctcctgtgattcattttctactgagaaaatatatagagagatacaagcaatgaaataagttacgtaggcacccacaaaccctaaccctaaaatctcattactctaattaattaatcaagaatctttattttttttagaatttgagagttatttcacttccattaatattgctgtgatcttcacattcttccctaagagcagccaacccttttctctctccaccaccactctccggtgacttcccttcaactgtgggactgtccgtcacctgatgatgagtagaatcggtagaggcggtgccaccggatgaaccgttaaacgtttgaaagtggtggtggtggagcggctgaggaggcggtggagttgtgtagaattcttgagaggagcaaaagtgtggtggaggcggccctgccgtgttggtatggtggtggtggacttggtggtggtagagagtcggagtgccaccatgtgcggaggtgtactccggtggaacccatatgccacctaggaccaccaaatgtggacctggcccacctgacgtttgtgggcttgggcttggtcttctagtgtgaagccgatacttctgtttgtttaaaatcaacacaccagtaaagtacttaaatatgagttaaaaaaagttgtaaagcatattgtggtgacttgtgatttaagttacctggagatggcttttgacttcatcattggtcaaaccatcaactttcatgagttcccttatttgtttaggtgtagccactgcaatgatataaccaacatataaatacggatacaagttcgattcaaaaattaaacactttttattaggttaacaaggttattttaatctatatttaataaactaaatccatatctaaaccggaaaaaaatagaattagaattagaatttatttggaaactaactacatatatttgaataattgttaagtacttaagttgatctctcatttttttttgttgattcaagttgatctatcgtatattcaatttcactttatgtactgttttttatcaaccgaaaaaactatagaaaacgccaactaaaactttataatatgccttttgaaaaaaataaaaatagcaaaatggaaatcatggcaatttgccataccatattcattattacctaaatatcgaataaaccacaaatgataatactagccatgtataaaatatgcagtatacgataatgatgtatgtatttggtgactcaaatatcatgtctactaaaaaaatcgttttaattagttgacaatttttttagattaaccatggtaaagctacttcaaattaatacttagttgattagaataagtgtatctgtaccttgcgagccaccaagcatttgaagagcttggacaaatctccggtgcaagtccggcgaccagcaacgtcgtgcctttctattactttgactcgttgtagaagaaactccattgctgttcgaattgttattattattattattatagttattatcattgttgatcatgctctcatcattaccgtcttggccattagtatgttcgttggtcggagagaccctcttgacctccgtggatagagctaattcaggcaaagattgttccttagagaagggaagaaaagcaccgctgccatttctttgttttgcatcaaaatgtccgagtttcggactactattaatctcgtctttgggaagagattgatcagtagttgaatcaatgttttttggtttggtttcggattggctccatagctgagcagtcgtcatccaattacttcctttgttgtttgtcttttcgggttggttccttaagggtatgaactcttcgagaactggtcttgtaccaacactttggttattgttattactatttgctctatatgcttctagttgttgtttgtaaacttccacagctggaaaaaaaaatcaaactaattaaagatggtaaagtaatttaaaatatgaaagtaacagatataacatgaaccttataacctttaaaatcactttagttagttttgttgatttcagtgttgggaggaaacaaaagttttgtgattcaaagaaatcaaaagcaagctctgatttttatgaaataaattcttaaattaatgaataaagatcttttcaaaaaaaaaaaagtgaaaagaaattcaaaaaactaatggttcactaggttttttttggtaataaagggattatttgaagatcatattatacacaagtatatatacgtagatctaaatattgtaaatggatatatgtaccattgttaaggagttgcatgcaaaggggaagctcgcgtttgaaggcatcgatcttgagacgttcttgttctaggcgagagagaagatcttcaagcttatgtgtggttggatcgctctgaaagttatctccaaaggatttcaaaagcatagagtagctttgtggcttgcaatccaagcttagttctgatgaggacgccatatttatagcttatatactctctctctctcgctgtataggaagaatatttattgattatataaatataatatagatgatcaaggaatcaagaagaatttgtggtgccttcaagtttcagatgatatatgtatatgctatatggttcttcagaaatatttcaaagattttcagggtttttggaaattagggtttggagaggaagagcgaatgaagaagaagatagaggaaaaggggaataaaatgttaggttgtggacacaaggaggatcacaaggaggttcctgtcctttttagagggctcaattcaaaggaacggaataatgtgatctgtcaccacacacacacacacacatatatctatcgagagagggagagactaaggaggtgtattttttagagagagagagtgagaggcttcttactgttagaagtcgttcctcttctctaatgagtcaatatttttttattttttttaatattatgtaaaattattcggaaaaaaactgttttacatcaagtgctgcttgtgtttgagcaaaatttgagaaaatataacaaagataaattatttttattttctaatgagtcaatattactaaaggtgtatcatgtgtgactctcatttctcaaaaagcttataatcaaggcttttgatgctaccatatatggcttcatgaatcttaaacaaaatagttaatatataaaaaactatggcttggtaaatattagtaaaatcattaaattagtaaccatttgatttgtttttttatcttctcttataatgcttagtttttaatcacttcttcagaaaattaatctatgtataattccatatgaaagaaagagaaaagagaggctaaaggagaaaagaggaagatataaagcagcagagcaaaagggaatatatggaaacttgttataaagaacaaatgggtaagaatacaaacttttaaattatttctaataaagcgatatattgtttttaatctcagattctgcttttgttggttcaccacttcacatagcttatactttcgtaaattcagtctcataattcttaagataaaatatgtttcctaattctcctataaatcttagctcatgttgactgaaaaatagatctaagctaacatttcaggtatttggttcttaattatcttatatattcgacaaagttaaaataaaattatggaatcaccaacgcaattatgtgaaaggaataaattgtgaacgttttagtacattttgggaaatttatagtcgttgccagaaaaacaaatattcttctaccaccttcttaatttatatagttaattattttaaattttcaaaaggaattgagattcaatataaatcaaagaagcacatattaggccacaagatttttatatttatagttgcacgacggcgagagagagagacagagataacgattgatcaatatttttttgtaaattgaatttcttaaaaaagttgaataattattctaaattttagtggatgcaaaaaagagaaagaaagggaatatctgatttaatttattaccataaactaggacagatattcacttaagtaaataatattgacagaagtttgagagtcgcagaatcttcccaccggactttagtgaagtggccaggaaggtagaagattcttcttacttagaaatattttaaacttttttaaagagtttttgcaattcaaagtcttatcaaaatttcttttcgtatctaggtttcattgaaaaccgatgaactaattgtggacctgataaaattaattctctaaaatgcttctgtttaatatttgatgcacatatgtaatacaaattaattattagatatatgcatattaaaacaaattcggggcggatatatcaatttgatttgatgatacaagattttttctacccaatcaaatttatattcaaggcaaataagagagcatttagaagttgtaattgtttagttgctctatgctttcatataataacatttctagaacattaatctctaaaaactaatgaagcaaaaataagctttacatatgtaaagtgtatttgagatgtgagaatctcgtcctcttattagtacttaattttcctaattggatagcttatgatgttttagtcgtctaatcactaaacccttccaagtttctgacatgtggtcttatatatcgagttatctagttttttgtaggatcaccctcagacctttctaaaggcacagtcaaagaaaataaaaattgaactaagcaataaggctacgtgatcgtgaaaatgcaagtgatgctacaagaactgcttaaaggatctacacatgacgttagaacctgcttgcaacgatattatagtctagacgtatagataaaaaagctgaaataaatatatatattctaattactatcaattataccattgaccaattaaatttctaaaattaatcggaacatcgcattcaatcaataaattatactccagtaagagtgatcctacaaaaaatgtttcttatttctaatattctactattagttgttccagtgaggtcaatatctgtaactctgtgttacatgtgtatattaattctgagaaaattatgatgaaaaagatcaagttaattttaaaatcttatcaaataaaatcagtttttcatcactgtataagtaatgaactcacttattttgtatgatatcgcattttaaaagtttgttactcttgtcttttcttttataattttttttataatatatagtttcaagcaaccaattggcatctaatgccacacatcaaattttcggacagaccctccgacatgcatatcctaaaattttggatatccaattcatatatatttcatattttcctcaaagttctttcaattcaagtgatggtgtattattctatatgctaatattttcttaagtacaaatatcattgtaccttattctctttaactcttgttaattaaccaaaaatttgaaatttttagttactttctataaattcagaaataacaattatttgaacatccttgtcatcacgacctctaaactatgattcgaaataagagtggaattatatatctcctttcttacaaaatcaatggtgatctcaataacaaatagagatgttgtagtgtcaaaaactttgcagactgaaccgacctggttcagttaaagtcagattagtattataggggatataaacaggatttctaatccgaaacaaatattactatatattaggtcaaatatggtctatatgggagaaactatgccaatgatttcttataaaactgatcattaaaaaactataggaccgaaccagaccaaacctagatccaattcagaaccgaccgcaaaacaatgtgactgaatatattagaccacatcaataatcaaacaaattgtgattctaaaccatgaaaataatataaacgatgaacggaacgtaacttggactactcgtatctttatcctcttttagacgccagaaaagtagaaaattgaattcttttgcgagccgacaaagaaaaaaaaaaggcttttaaaaaatgcatagtattgacataagttttaagtgacttaggtatattcttgtatttctctattattaaatctcttgttttaaaaacgtacctaatttctaaaaccatgcactatagatttactagtgtataagcattattgagaaaaactggcttcacattttaagtttttgtcgaatattttagtgtataaccttggtaaacattttgggtttttaggtataacaggactaggctaataatcggattgcgggttgccaatctgacatcccgatttcaagacacttgttatacaaaatatataatatctccaagaataacatgtaaagaagaggaagaatataagaaaaaaagaaagtggagaaatattcgagagtccgtatttaatacagacaaaggggatattcagacagaaatcaaagttaagaagctagtcgaaacgtgtcacgagagaatcctcttttgtgcgtgctttgcatgggatgctaaaaaagaactaactctttacttttcgaccaaatttattaaccaaaatgtaatacattcccgaaataaaagaaaagaaaagaaaaagtggtaactaaagttggattctaaataagaatctttagaaaagttaagggttggagtcttgcacatgaagattttaattggtttgaacaaatgcgaccaaccaattatttatttttccttccaaaatttgttttcctcatgttgttatttccctttttttttgggtcaaaatagataataagttaattttcggattctaattttggagggtaaacgttattagtttttttttactaaaaaaagggtttatttaaaggaaataaatgatggattcaagactaattatatacacaaagggaataataccacaatgactggttaatatgtagagggaattaggtaccttctattttttaagaacattctttttataatataaaatatatttttattagctttaactttcaggcaaagttctttattgcacttatcctattatattatctgcatattctggcatgataatttttacagaacacatgagcgaacaaaccaacacaaatatacgtgtatattcgtggctgcctgtatataatatagattaattgtatatctattttgatttttgtatataggttttagaataactatacatagattcagaaaattttagtcttaaagggattaagtttttttttgtttttgtttttctgattttaatttgtacgatattatatcgatatgaattataagttggttctacatggaacctagtttgcctcaaattcagctacctgtgttttaattatatattcatctgtgtttccaaaaatctaaaaaaacttgttttgcctactagattaattatatgaatacttgtgaaccgacataagatttctggcattcaacaattggaattaccctaaagggaacacaatattcccagcatgaattggcacatttggttagtccagcatcaacataaaatgtataggctttaatgacataaaaacaaaacaaaaacgtaaaccaagattatagttcaattataaacaatggatgattataatcaattggggatgtagctcaaatggtagagcgctcgctttgcatgcgagaggcacggggttcgatcccccgcatctccatttttatgtacttctttttattttagattttgacatcaatcataatgtagcaaatagcaataatatattgctctcgcatagataaaatacagatacttaagaatcaagacaaacatcatgatatttcatgtatataactcaattgtactaaacatctcaaaacttcaaaaaaatgcatagtggaaaataaaataaaaagaaacaatctcgtttacaaaattaaagagcaaacaaaaattggatgaatgaaaaatatatatatagctacaattttgttcaatatcaaaaattaaagaaagatagacaaaaagaaaaatgaaagaatattgaatctaaactctttcttctactcatagctctacagcttccacttactacatagccccttcacaagttttaaaaagccatccgagcaacaacaaaaatattgattttatctccagaatttgcaggagacataatttggatctgttttaataaaaacaaataagattttgattacttacaagctcaggatttgacattttgactgtgagagtaagagagaacttaccagtgaaaagactgtgtgtagtgagtgttgtttatggtgaaagaagcatataatattttgatgttgcttttgagttattttttgatgaatggtttttgacagacgagaagtctttggtcactaccatcttgaagatcaatgactcttgcttcccaacgcactcgagctgcaagtgctcgagccatctcgattactcccactttgtcgcttagaacaacccatccctattgaatcaatcacacaaagatcactttggttagttgattttttgggatcttatggggaaaaaaagagagtggtgtttatatatatgaacctcagggcgaagaatccggtccatctccaagaacaagtccattaggctgcatcgttctgagctaagatgtgtgagaagttcattggcatgaagcatgtcatatgttcgaggatatgtcgggaatggttcacacctacgcagttgacaaaaacatttaagaatcaataaaaaaaaatcgatataattcttcagtttgctgcaaatgttgcttaatatctaaaaagatcttctttaaccattattataggtgacagaaggaaaaacatacactcaccagtcatgtagaacaccggcgaaaccacgatcaagtatgataggaagagtattacgtgcattgactgggacgacgttcattacccaagcagattttccttcgtcgagtaaagcggcatttaaattcccaaaacgagcatgcatgtccatcacattgcgtatcatgttgaaaggcgggagaggatcctcatcaccgggtctcttcggatggtcagagaaaattagaggtgtaagcaaggaccaatagtttttcagagctgatctccatatttgtgtatcctcgaagaattcttccggttttaaacctgtattcagtatatccaaaacaacatattaaattctgaaagtatcaagtaaaatttaaacaatgagaaagaaacaacgaagtggttatccaaagaaatactttccatgaatttcaagcccggcagaggttgttcctgcaacagcagacctgttctgtatagaaatccagcgtttactcgtggttccgcttatacatggaaccaatgggtggtaatacggaacgctatctccatctttgcaaagaggtatagaagcttgcgaactagaccaaccagaaaagaaagaaaaagcatcaatacaggaaagccaagcttacgctttaaatgccaagaatatgcctcaggatcacacttaccgagaagaatagcaacttgaatcagaagttttctgccaaagaaacgtctcatcctgctgagctgttagactccaacagattttcttagataactcattcacccgtgttgagatgctcgttttcttggtatctggtaagtttccctgtgctttgtttgtgggagaagttaaaacaaagtatcccccgggtttcagaacacgatccacttccaaaagtagcattgcatctgcttaagggacaaacagaacgtcaacatatcagaacaaagttaaacatattaggagatctcaactttaaaagttcaaaaacaactagacacgcttgcaagacctgttgatgtgattacctttgatatcccaagtagtgccacattgagcacaatggaccatatcaaaagacagtgctggataaggaagctgttttgaaaagaaattgccaatcattgcaggaaggcctctctctagagctaactgaacttggctcccagttgcctcatactcagcaatacatataggcatcagcttcaaagacactaaatgagcaccaaagctaccaaatccgcaaccaatgtctaacacagtccgtacctgcaagcatcagaagaaatctcagaagctggaactgaaaattttgatgtgtaagataataagattaagaatacttacacccgcttgagcaaattcagtatcacttcctaaacctatcatctcagcaatttgacgagcatagtctttgaccccatcaaagaccaggccgtcctccgagtgaaaggttatttgattctcttcaagcaacattaacctaataatgatgacaatgaaaaataagacatcacagaacagaaaccatatacatggggaaaactgaatttgaagaaaatgtatgtcaaaagacctcgttgtcacagttcctgaagaaagaaactggtctttggtaatcttcacgttcccactccatatgatatctctaccaagtggccacctaagtggtattttataatctctcggaggacgaactacacatctttccttctctctttcaaactcgcaatgtcgatctaactcctcaccctcttgaagcccagcaagcaaattcccagttatgttataacaaggcacataactttctctttctttaccacaaaaaggaaactcttttaaactagcccctaaagaaagagacctcagatcaagataatcaacagcagcttgctcctttatcctcctatagttactataaatgttcggcacaagtgtcgaacttgacgaagaatcatacgaattagatgtcaatggtgctaaaatagtaactagagccacaacaccaacaatgaagaataacaaccctctgatccgtggtctgagaccaaaaacagaggaaacactcttgtaccaagaacctctcatatcattcgtaagcagaaaccactaattcctctcgctgtacacagaaactttttcatccgcttctttcaccaaacaagtctcaattttgaagcacatagtctcattacctgatcaagccacaatcctaaggagacaaaggcaagatttttctccactctttatgatccaaatcaggaaatggcctcactactaatagagatgccaaaattcagaaccaaatctcgatgtagccaaaaattgaagattaaaactctcaaaggcaaatgcaatcaaatcacctgcaatcaaatctcacagatcaaaaatcgaaattttcccaaaaaagaaacattaccatttctagtgaatctatacattaagcgaattttgcttttttgtcggcgaaaattcaagaaaaagaaaagcttgataataattctgatggataaacccatgattgagatctcgagaatggcgaagaagatcagatcaaataaattaaatgcagacaaaatgacgataatcaaattagggtttttgagatgcgtaccaaagttaacagatttcagagcaacaacaatggcgaaatttttgagagattcagaagaaagatagagagagagatattccaattatatgggcactctcttgtaagcttctttttttattaatcgaattttctgaatatggagattaataataacaaataatgatgatgaagattataatcctaaacttagatctaattaagaaagtatgtgtaagtaaactttttaaaacaaagaattgtttagttttggttccagcaaaaaaacagtcatgaggagaataattgcaaaattcgtggtgcacttttgctttttgtgcatttattaaattggtctctttgtctcttggtctctttattttattatttttctaaaattctctatatcaaaaaggtttttgttaattattattattaatttgtatgattatgttgttggtggtgagcaataacaatccactactataaaagaaaacctaattttcatgtttatgggttaaataatttattttatacgtgttaggttaagtatatttataaaattttgagtactacatagaattatgtaactcaattataagagcatgttcataggtgatactcacaaagtatcattaagaatttttttagtattatttataatgtttgtttaataaatatatataattttttttgtttttgtcaaatgtgaccaatcagaagaagccacgtcagatgatactggtatcataaatatcagtggactgatactgatcaaacatattataattgctttattaatataaaaataattttaggacttgtgatactctaaaaatatcacctatgtacatggtcctattattattatatgtacttagaaaagagtcctatttttaaaagaaataaattgtccttgttacgatttatggaagaagaggaaaaaaaagaaagaaatcaggcaacaaaacgtcaaagcaatcgttttcttattatgtcgcattaacaactttgaaagaaaacaaatctaaacacaacactgatattttagtcgtaaataatatttttaaaaaaccaacaaagatatcaaaatctcaggacaacgatcgaacttgggttgatgtcttgatgagataagatcattagaacaacatgcatgatcaaatataagcgtttactaccttcaatctctccattcgagtaatctaaatccatttgcacaacgtctcatggatgatgtctcgagttttggaataatccgttttgattagatattttgcaagagtttgtgatcataatataggattctatgaagatgggtatagctcataaagagaagaaattctattagtttttcccactcaagttctcacaaatcttctcattgaatctccaaatatgtaattacgaagcttcgcttttttctagtagacttccatgaaatgaaggcatgattaaaatacaacttcttaggaattatcacaataagacggatcactcctgcttatatggatcattaaaatgtgatagaccgtttgtggaaaatcatattaaccgtttttaatgatcatgataaacatcttgcttggacacaaatcatatatatgaaagttggtcaactctctccatatgaatgacacatcatcacactggagagtgccacatgtcattctaaattaatatcatttaacaattaacaaaagttagtgacgaaaaattaaagttctcatattgcattaaaccatccatcaatcccactcttaattaactattttcaaaataaaagaaaaaaatacaaatcatgttaatgtatcaaacactacttttattctactttttctattttgctattttttatagtcattatctgatatttgtaacttagctgtttgctatttaaccttttttagtttagtattttaacttaatcttctcttattattacattttttggtctacatgatatatgatttttttgtaccttatgataaattggtaatattaataatgacatacacatttttcaagtaagtttttttgggatcttagatataccaaaacattcaatacaagacactttctccaatatgggtatatgtaaatgcaaagagagatacctaaaagtgttgacttaaatgactctttaattttttgctttttgttttctcttttggtataaaacttttgaaataaatgagtagatagaacttttgaaataaatgagtagatagttatacatttgttattcaaattattacaattcaatatttagtcatgagcttatcatgatgtgactagagtactagattaggaaaatacatggaacaaagaatagtttgcttataatcaagttagataagtttcaaaccacataagtaatataattgcataacattgtattatatattgttgttgtaatattttatgatagttaaaaaagaatagaatcttggatatatagataagaagatttatacatgaaaaaagtataattgatttttgatcaaaggtaaatctaactaaaaaaaaaaattatagaaaataaatataattttattaactatataataacatacacaaatatgaacataaattaccaataaaaatagttaaaatataattatttttaaactattttcaaaataaacccacgcgtagcgtgggtactcttctagttcttttaagttaagatcattgaaccgttgatttctcactgcagggttgtccacaaatcactactgtcaccattgctttgatacggcaagaaaaacaaagatattgccaagaaatgcaatccatatcatgttagtatgttacttagagctcgagcttaacaacttaagcaacgaccatcaaataaaagtaatagaaatctttctaatcatataacaaaatattagatgtatctactttcattaagtggaaataagtcaaaagatctaactttagttactgtatgaaaatatactttttgaaaatctttacttgttttttatttttttatttttttctaattttttctttttttaaattgatatgtcatcaaataagttttccttttttacaaggcataactctctttttacacaatagatttaacattatgtttgatttccataattgtcaagattattttaggtggtttaaggttcaagattattttctcaattcggtttataaaccggttaacttgaaccaataattatgtctagatattgccaatgcaagttgattacacgtgctagtttaaaagttgaggctatttttgtaactttctattgagaggatttttaataagtttatacctctctcccttgttcacgaacccgtaaccctagccgccttcaaaaattcccaatttgttttttcaaacaaacttgctcagatcctcttcttcttagggatcaatcttcaaatcaattgtaagtttcttgtttcttataattctatctttcgattgatacctgtttcgatatcttcaagtctagttttttttttttcaatcgagtttttgatttagatcacaaatcgacagatctgtttaggcgtttttctgggtatcgattcttttcaacatccatgccttaatttcaagttttccccaattttcttaaccctaatatttatgtgttcatcagatctgcaaatttatttagggcttttgttcctcgtgctgaaagttaatcgattgtttgaatttggactcttgatttcatgtttttagccgtggattgaaaaatctagggttaggttttcgaatttggggttttttttttatttttaatatctgtttaaagtttgactttttgactaaaaattaaaaaattacactaataccctagattgttaaatcaattcaggttgttaaaataaatgggattaaagcgaccttatgatgctgaagagatgcaaaagtgcaatgctaagcatgcaagacagcttagttacaaaaaccataaccaatttgacgaagctattccatatcatcatgcttctatggagaagaagacaaatgttttaggtaacaacccgaaacccttttaaatgtttaaattcatatactttgttctgctaagttttaactttggacgtgactttgttgcagtagaggatctgattggtctctgtgagaatcctacgtggactaatgatgcaaatcacgttgacaagggttttgaaacaaccggtttgtgtcaggaagattctcagtctggagtgacgactcagtcagatctttctcatcaatcttctggttcagatttcacctggaagccagtggaagatgtttatacttgtttgatgaatcaacctcctaggaaacaagttcttgttgggtctaatcatcaagcggatattcccgagtttgtcaaggaagagattcttgatcagtcagaggctcgaactaaggaggacttagaagggaagctgatgagaaagtgtgtgataccaatgtctgactctgacctttgtggaaccggtcaaggaagaaaggaatgtctttgcctagataaaggctctattagatgtgtgcggcgacatatcattgaagccagagagagtttggttgaaactattggatatgaaaggtttatggagctagggttatgtgagatgggggaggaagttgcgagtttatggacagaggaagaagaagatctctttcacaaggttgtatactccaatcctttctcagcgggtcgtgacttctggaagcaattaaagggaacgtttccttcaagaaccatgaaggagttggttagctactacttcaatgtcttcatcttgcggagacggggtattcagaatcggttcaaagccctagatgttgacagtgatgatgacgagtggcaagttgaatacaacatttttaacagcaccaaatctttagatgaggaagacaacaatggaaatcgctcctcatatgaagataacgaggaagaagaagaaaccagcagcaatgatgatgatgaagaagaagaagaggaagacgactcatcaagtaacgatgctcattgtgtagatacggataaggcttcaagagacggttttggtgaagaagtaaatgtggaagacgactcatgtatgtccttcgagttacaagactccaacttgatcttcagtcacaacccaatcaaaaacagagagtgccacagatctggtgaagattcatattcatttgatgatcagagattcacatcagattgttggaacaagaacaacgatctactaccaacttcaaacattattgaggagatatttggtcaagacgattggggagataaagatgataataacttgaaggagaagtaaataaaaagttttcttctcctctttcatggattctgcagattttttttttcttaagtgaattagataaagatgcagaagtttgaaagtttcatctttaggagttttgtgttggttaaggttgaagaagaaaggacttcctgattgatttgactctgtaaaaaatgctattcaaatccatgaacctttttttctctagttgttttagtcctcaagatctcaatgtacattattatggtataaaaagaaaagaaaaaaaaatgctaagttatccaaatttttgtttgcagcttcaaatgtcttaacagtgaaaatcttctctagatatgttttgcatattttgaagatgacaaatgaaagaaaataagaattgtgacaacaaaattgttcaaaaatatatattagcaattgagaagctctctttgaaccaggttcacttccacacaaaagagcaaacaggtgaatcatgttgatgcaatttaccaaattaatggatatgttttacatgaataggcaaaatgtgtgaaagagtcctcaccaaaagaaaaaaggtgtgaaagagtagctttcaaagtccaaggataaatgaaggagcttgtgaaagtattttcaaatacatgtatcagctccactgaaaattaatgacactcttgagaattttatcaattaataagtctctgcttttttgttctttcctttaagttatgacgacaccaaactaaaccagccaagaaatttgcagcagaagatagagaagttataaacatgaaccagttctaatatttcgcttataattgtggacaactttaggatctttgcacgcggtttaataaattccacgaactttcagatagataacttagccttcttcccgatgatgtgctagtgagcatctttgcacgcgtctcaagattgtactatccgactctaaatctcgtctccaagagctttagatgtctcttagcttcaccagagctatacaaggtccggtcactcttaggcaacaccgagagttgtctttatgtgtgttcacggttccaagatcgtcatacgaacactacctggttcaccctctgtcggaaacctgatcaaaccctaaccaatggcaccatcaagaagtcaagcgggtatgttttggctagagtctcaaatttacattctcctcctttgcactcttctagtctcgtagctgttggttctaatatctataacattgcaggatccagctacctagagtcctcttcaagcgtctccattcttgattgtcggtctcacacgtggcgcgaggctccaagcttgcgtgaggggctatgttctgtttcttctagtgtccttgatcgaaagatatacgtagcaggaagttgcttggatggtgattcttacacctataagaattcgttcgaggtgtttgacactgaaacacaattttgggatcctgataccattacttgcagcaagacggaaggcgatttttacggatgcggaaccgcatgcattgacggagagttccatgtggtgcctgtaggtcaaaaaagagaggcggttgcttacaattccaaggaaggtagatgggacatggttggccaacaaatggatcattataagttttcagcttcttgcgagatacagaatgttttgtactcttgtactcatggagtgttcagatggtatgacactaacgcaatgatgtggagagatttgaagggtttggtaggactacctatgttcggttctggtgccaatgttaagttggctgattatggaggaaaattaacggttttgtgggaggaggagttgccttctcgtggacctgatagcggctataagaagatgattcggtgtgcagagattgcgcttgaaaggcgcaaaagttgtgaaatttgggggattgttgagtggtttggtgatgtgcttaccgaacctgtaggatatgttgttttggagaaggttcttgatgttactctttgatgaaacttgaatgtgttttcttttggaatacttgtgtgttcttttggtgaatgtaacttctgatgaatgagtcttgtctcttgtttcacttctaataatttgatatacaaatctgtgtggcaaacaaacaaacaaacaaacaaaaacaaatcagttgaatcatgtctcctcgtttttcacttggatccaactacgattagatgatccaactccagattctttctttttacgactaagaaaaccgacaaagtacccaaaaatcactcccacaaccatcacacttgctccttcaatgtaccacaagactgcaaagtcagattctgatccaaagtttgagtctttagtaccatcatcactaccgctaataacttccccagaagccaaaatctcaacaacatcatgaacttctccgtcatggtttcccacataagaaagagtaagtctttccttattagcaaccaaacgaatgtacccaaactcgcctccacggtacattgagttagcaggctgaggaaagatcgggacatcctcgtgattagctctcggttcccacatcggttgtgagtcttttccagccataccaatcacaagatgaactggatttccttgccaacgttcaccacaagtattgttactaatcgcacaaaacctttcatatctatgtacatgtccccataaagcaaccgtcacattgttcttcactaacaacggttccaaatgctcgatcatcttctctcttatagcagcgtctctgatcttcctactcgtagtgtacataggtctatgcccttggacaacaacaaacggtgtcttactcctattaacagactccaaatcactcttcaaaaaactatactgcttcccacctttaagaaaatcagtctctgtcgaaatataaacgaaatgaacagaacccatatcataagaatagtaaaggttccgactttgaggtcccttaaccataccagtagcttccgttgaattaccaggcatgttgaacttaacactatacggtacaccacattcaccaccactatctttaccataaacataagcagcccaatctggtttccaaggctggttaggccaatcatactcatggttaccaatacatacatggtaaggcactttagaagcaataggctcaatctgagtaaagaactcatcccaaatccacgagtaacctcgtgcataacttatatctccgatatgtgatacaatcacaggcttatcatcacctaaagcttcaatgtctcttaaaatccatttcacagttgataaactttcttcttctccacggataaatgttgtataaggtgtataacatcccatatcaccaaacatgaaagctaatgtttcttctgaaccctcatttcgagaaacaaagctatgaatctcactccatccttttaaatcactcccaacctaatcaataacaaaaaaaaaagtcaacattttgattctcaaaacccctaaaaattcaaactttaaggttttttgattctacttacctgataataatacctaatcccttgttttagattcttcatcacggcatcgaatgtccaacctggatctctccatccgactgtagaattcgccggcgcgtgacacatatgttctatctcgtacctaactccacgcgccaccgctatgttatcgagcttgtccttaacctcaccgtagcgagcttctcgttcttctccatctccggttacaaacactactctcatctcgttgatgttatctgtgtaacttaaatgaatctgctccggtcggttaacagcgaaccggaaatttaactggtttgattcggttaagagatgacgagttccgggtaaaggattgtgatcatggtcttggtgtttcgggtttatttcggattgggtccaatgaaagatccggaaagtgtaatttgatcggagattggttaagggaagtgaaatcgaacccgacccggattgccacgtgggtgaatcggagaggaatttgtagccgatgaagtgatcgtgaggagagtccggtggcgagtagattcctaaccagtcgagatcggacggtgattcgacgccggaccatttgatcacgactatgtcgccggatcggtttaaggtttggggagagattgaaatcgtggctttggaataaacagaggagattaagaggaagaagaagaagagagtgtaaacggcggcgatcatgatttacggcggaggatggtggttagtcaaaaagtcaacgtttgttttttcagttttagttggttttggggttttggtgataattaagaagagttttttgagtgattatgaagtcattgtttgaaaccaaacctgatttatgacttttcaccttcaaaagactatgctattttagatataaaaaacatatattatggaactaattatttattccaaatttacattttatcaaccagtttaattgtcaaatcatacataatttattgttttggaaaccagagttgtcattaatttgttaaggtatatatgtaggatatggttaatgctttgtctctgtttcagatacaaaatagaggttccattataataaatgtgtaatcaaaaaagcataaaatctcacttatgaccaaaaaaaaagaaagcacaaaagctcacaaatttagagtatgaataaaaaaaattagtaaggtgaaaaaatggaacaggggagattcaaaggggtgacctgagaacacaaaactcaatggtttcaatggaaatttgaagaaaccataggatatgtgttcacatgccactcctttgaaatttcacctcctgttgttcttctcttcttctccatactttgctttcactgcttcttatatatactatactacacaagtttctacatatataaatacagtttactcttcttggtcttacttagatttttgttcacttctgttctgtcataataatgtggtcatcttgttgacaaaaaattagtaagtgtgatggaaatgaccacatccttttcttcacatacgacaacgttcaatggaatgtatcaaacaaagttgggctcagaatatatatctaataatgggctattaatgagcccatatgagctctcttctcataggcccatccaaaactcatctaaactctgctaccaatcttcaaatagtttaattattctgccgacaaaatcataaatggtcaaagagttggatagtcggacgaacgtggcatgaggacccatttttccgtgccactcatcaaaacctcaaccaatactaaaacttttaagtgtagtaaaatacaccaaatattacttccctataaagtataaactctacatttatgatgaagaatccaagattatactagcatttacataggtaaacaaatacccaaaactaaaagtacccatccaccaataaaagtaactctatgatcaagaatcaaagataataagaaagaatttatcaagaccggttatgagggtcgacttttgcgaaatggtcaaatgtaatcaagcatcttttttacgtaggaagagaataaaattcactcactaaagtcgaaaagtagatctaaggcgtaagaatcgtgactataaatatcccattaactagtggataaagaaaaagaagaccaaaaactagtggacaaagaaaaagaacaaaaacctaatttcaagaaattcaataaatatcatcctccggataagttgttattgtacgtttaccaaattcaagaacaagaaaaaacttttcctttgaaacaaagaaacatggatttcttcaccgatcaagtaaagaagaaattctccgacaagaaaccggagagctctgatccggagccaaaccacaacaaaaacaaacccggtcacacggagccaacaacacataaacccggtcacggcgagccaacaacacataaaccggtctccaacaccgatccaacaacacacagaccggctacgaacgctgagctcatggctagtgccaagatcgtagccgaagctgctcaagccgctgctcgtcacgagtcagacaagcttgacaaagccaaagtcgccggagccaccgctgatatcttagacgccgcttctagatacggtaagctcgatgaaaagagcggtgttggtcagtaccttgaaaaggctgaacaatatcttcacaagtacgaaacttcccactctcactcctccaccggtggaactggaagccacggtaatgttggaggacacggtggtggagctggagcaccggcggctaagaaagaagatgagaagtccggaggtggtcatgggtttggagattatgctaagatggctcaaggttttatgaagtgagtaatgttttagtttctaaaaataattatgttagtaattatcttctataattactgttttagtaagctgttgttttttctgaattattattaactgttggatttgtcatttgtgtatgatggaggaaattatgatgttaaagatcatgtatcatgttgttgaccactcgagattgcgttaatcaaatatttgtataattagaaccgaactttaagttatgggaagtaatactaattaatatcgaatttaaatggaccgtctaaaaataaataaactaattattatcctgagaagaaggaggaaaaacacaagaaaatgataatttttaggttttggcaaataaattaaacctaatgtatcgaactgaaataggaaagcaaaataaagtcaatcgaaacaaaaatttaaaaataattactaaacattataatcaaaagaatcgaaacttgaattactacggaaccaaaatattttggataatcaaaaatatccgaaatctataaatacatttttgcagccattttaacaaataaatcttagagttggacttatttacaactcaatgccattagcattaattttttttttccgaaataattaattttactttaaattcttaatttaaattgtcaaccacattatcaatcaaatttaatccaaacaaacttcacatcaatcccttaaaattagcataaacgtatttgttaacaatattttaaaacaaagttttttgtttaaataaatattattcttactaaacgttttttgtttaaataaataaatcatgtatttgaacttatttacaatgtcatgctactgaaattaattatttagaaagaaaaatatttaattaacgatttaaatcttctaaatctttgcttttagagttattatgtcattatctaaaaagcaaaaatattttaaaatatttatatatttaaactttataaaacattattaatatttaaacttataaaaagtttaatatatcaaaaattttaacatcattatataatatatagtttaaaaaaatctcaaaaaaatttccgtcatattttgtgattaaaatttttaaaaatgaacatatattaaccaattggcgaaaaaatgtgtgggttcaacatcccgcatcgactaaaatatttagacaatgattcataaataagatcaacattaataaaataaatggttttttttgcagaacgggttttgcgagacgggtttgggaggacgttacttaataacagttgtaaactataaaataaaatattttatagatagatacaatttacaaatttttatatatactaactttaaaaaataaattgtccccgcggtataccgcgggttaaaatctagtataattatattttctaaaatattaattatttttggatcaaataaaataattaaaaatacctgaaaatagataaagtagtaaaaatactcaaaaataaccgaaaatgtccgaaaatatccaaaaataaccgaatatccgaatatattcaaagcaaaataaccgaatgaatactaaattttgaaaccaaaagaaccaaaaccgatagcgaaacaaaatttcaaaataagcgaatgaatactaaattttagaaaaataaactgaaaaccgaatgaatacgaactgaaagcggatagataaaccaaacgcaagtcctgagattgtgtaaaaggcccataaacgggcccaatatgcgaatccattttgttttcttgttgggaaattaatctttttctgcttattttaggagaaattgttttaattttaatttagggtctcttgtctttgatcttttgtacactttctctggattttctgaattcgaactttggaagaagaagaagctttgatcaatcatggaaattgcaaccgatacagcaaagcagatgagagacgaagagttgttcaaagcagcggaatggggagattcatcgttgttcatgtcattatctgaagaacagctctctaaatctctcaatttcagaaacgaagatggtcgctctctcctccatgtcgctgcttccttcggccattctcaagtttgttcctttctcttttcaatcatattaagaactaatctgtggttagataacctctttgattactatagctgcagtaaataggttgtttaactgatgagaaagccttaagggaagtttttgagtctcgctttgaaaaccacacgaatctgcgttgtttgggttcttgagattagtgtgttttaggaacagtgtcagtatgtgtaaaaatgtttatggatgtgggatttgcagatagtgaagttgttatcaagttcagatgaagcaaagactgtaatcaatagcaaggatgatgaaggatgggctcctttgcattccgctgctagcatcggtaatgctgagctcgttgaggtgcttttgaccagaggtatgttacataatcttatgtgccttattgttgttgaaacggtggtaaaatcttgttttgctatcataaagctgtaatctttatcagtcctgagtagttgatctcttaatatctaatagtcctccattggaattggacatataagttcctactgtgaagtagttcttccagtgtttagctctaacttcaattcattgcatgtatgagaagatggatacatttgatgacattttctttgtgtttaggtgctgatgtcaatgccaaaaataacggtggtcgcactgctcttcactatgctgctagcaaaggccggttggagattgctcagcttttattaacacacggtgcaaagattaacatcacagacaaggttttgtagcttcttaatgtcttgttgcttgtgatcatcaacacacaaacaaacttttttttgtgtggcttttaggttggttgcactccgcttcacagggcagcaagcgtgggaaagttagaagtttgtgaatttcttattgaagaaggagcagagatcgatgctacggataaaatgggtcaaactgcactcatgcattcagttatctgcgatgacaaacaggtaaaattttcaatctaatcaaccttaaaagcaacatttctttaaagttaaaagtttccatggatcaggttgcgttcctgcttataagacatggtgcagatgtggatgtagaagacaaggaaggctacactgttctaggccgagctaccaatgaattccgacctgcacttatcgatgctgctaaggccatgcttgaaggataaaatgactctggattactttaaaacttactaactctgagagttgtttagttacttaaaaggatttttctttactgtatcatgtttgcaaaatgtttctgccttatcaattcatgttctgtctttagaaattttctcaaaagcaattttggaaacaagtgagaaaaaagtttttttttttgtttggttaaaaattatatatatccttcttatctcctaagagtcacttaccctcctcacaaaaatctaaaggcaaaatgatgcaaacaaaaatctcttctttctctcgaccaagctttagtctctatgaaccaagagtaattcatcatcctcgtatctccatggctctatcatcatcagcaccatccccgtttcaccatcttctctgcaagtccaccttccctctcgctgcctcactcacccttctcctctctccttgtaccggtaactacactactactcaatacttttcctgtgattcaatgtatatgcgtgtcatcatcatcagcatcatatgtatatgtatggatggtcctcagctgaagcaggcttaatgtcgggatctcccggtatagaatcagttccaggtcctgaattaccaaaaatcgagttccttgaccgtttcaatggtaccaatctttcaatttcttgaattcaagaacaaaaaaactgtgtttctctgctctaagaaaaagcttgctaattgcagcaaaaaaccagaagttctacgcagagaacgatgccagattcaaagattctccacttctcaagaaattacttgagaattccaaactcaacaaagaaaagtaagttactttacacacacccttttggtcttttatgatgtaacagagccaacaatgtgcaaatcttgaaactttacatatacccttttggtcttataagatgtaacattgtaacatgtaacattggttttggtgttctgttttggttaggaatgaaagagagattcaagacaaatattgtctgagaggagcagaatggggagtaggagattgctcaaccacaggaatgacagatgaagaaaaggagaaattcatcacaatgttgaaaaagaagactggtgttgaataaaacacacatcattgtatttttttgtttgcaagaatggctttagagagaatcatctatgctaattgtttaagtcacaatccaaatccaaatggttacaaaacaaaaatacatgtaggcatcgtgtacaaacaggttttttctttttcttatcgatctgcggttttgatatcgagaagagaaagtgtagcaatctcattcataaccaatgctttatcagtttcaaaacctacatcttctttctcaggtttcaaatcagcaaacaaacgaagaatcttggtccgattcgccacgagaatcgccacgatatcctcaggtttgttctcgtttgccacaaagagtttaaagatatgaaatgcttctaactgaatgttcttggttggttctcttaaaagattcatcatgattctcaaattatccaaactgctcacatactttaccatcacacctgaattcgaacgatccatcaacacatctccaagcaatttcgacgcttgtctcttcgtaaaatagcttcctttctccaacaacttggtgttatactctgcgaaaaaccattcgtagttcttcgcaagatactccgctacagtcgatttatgcctcgtcaaaagctctctgaagatcttgctagcatcggtagctacatcgaaatacggaagctgaacataatcgaaaaacttctccaaattcttcgattcgagtatgtactttgcaacaacctgatgccgcacacattctttaagcattcccgtgtaatgcaacgccagctcatggtcgtgatcgataccttcgactaacgaatcgataacatctaagttcgattcaagatattcagaagcaacgagtcgaaattcgacttgttgcttctgaagattcgcgacaatctgtgtcgcgtcttttcttgcttctaggtcaagttttggtatagatttgatcaaaggacgaagcgtgtctgctcggaaaaactcttgagttaacaaaagacaagcttcaggaacaggctcagcttcaccattaccataaagaatcgatttcaaatctctaatgtttcgacacaactccgcacaaatccctaaccttttcgagtttctcgcatcggtttcttcttcttcggattccgctaaagcgatgagatctcgagtctgacgtacgatttcaccaggaagacgtgatttgttcttgaagagacctttcattctcgtgcttcctccatggtttccgaggttcccgcttaaactgctaagcttcccgctaaatgtgatgttgatgatggattcatcatcggtggatccgacgcgtagatggctccgtgtacggcggtgctttgacgacggagctaaatcggagcttccgtgtcgtttagcaccaccgattatggagacacacgcacctatgtttctcctttttgttgacctcaaaacaaagtacaaaaagaaaaacagagcaaaaacaaaatctatgcctttctctatctttttattctagggtttgttcaaaagctttttcaggggtttcgctgtgaaatccaaaaatgttgtttctatgaaatcttcttctttgaagaaaggaagaagaaagagacaacaaaacctaaaaatggagtctttgattggctaattttgccgcgctgaattttcgttgtggttagtttgaagaatctttgatgtcaattagatattaaacaattttttgaagcttattattctacacagtccatatctctagtcaactaattatctaattatgttttctctaaattaataattcttcaaaattttaatattttaaaattgtgtctattcattaaaagtcttttgttttcatactttttcacaaatagttgcattttttcaccacaattgttttgctaattatgtttggagttttttgttatatcttaattctcttttagattattgcatatatcatatgtttatctaatactcatgtttttaaaaaggttttatctatttttctttataattttagacaattaccaaatttttcatgaaatttatttttagaatgtatattcatatatatgtttgatttttaaataactacattccttctatactttcaaaactatttattagcttatatcatattaaatttgaaaaaattcacggactcaacaaattttgcagatagagaatgagatcacgtatgatgcagagtgatctcgactctctatctacgaaaattgatcttagcttgaaagattatggatttctctatataagaagacatgtgacattcagttgagcaccatattgtaggcatgaaccaaaacttaacttacttagcatagattgttgatgtgtgtttggatatgtatttatttttttcgtaatcggcttgtctccttcagccgtatttcttttccaaacattgggcctttatgaggcctaaattgggccttagagcccaaggagagttaaaaacaataaataatctatccagaggcattaagtttcaacgaaaaagaaagaaaaatctgtgaggacgaaaactctccgtcgttccggcgagtttctccagtgatcggcaaagtctttccggcatctattgaatttctctaaaccaattagtaagtctcttgaaatttcaattcaacaaacgttttgctgtctactcgaaggttttgactcgtgtttcgatttcaattttgaatcttagacaagtttgctatctcagacaagttcttgttgagttttgtaggaatattatcggtcttgataaaataaaatggttcaaagtcagtcgttaagcacattaacaatctgtggaagtgtaaaagtttcaagcttgttgaggaatcgtttaaattcagtgaaagcttcaagcttgatcggtgatcgatgtgtttcgtgtcagtttttgcgtaaatcaccgtcctttagaagccattggaagtcattaaagcaaagaaatttgttgagggttgaagctagatggccatttcaaggaggtggtgaacaaggtttagacccgagctctgagagaagcgagagtgctaatgaagatatattgatctttttctttcagctggatttggctactcgtgtacaggttaagactaaatgcagggtttttatctctttcaagatggttgctaatggttttgatgtgttacaatattgaatgatatgtggattggtgtgttttgaaatggcagtatgcaatgaatctggagcagtacgacattgcgcaacaactaagagaaaagctaactgaggtatatgaaatgctatgatatgatctttaagtgcaataagttttgaactatttgatcattcaaagatgttagcttttggctagacttatctgtgtattcttgtataccgcaatcgcaacggaggagtgaataacagtctgtggttggtaggtggaagaggagtcgataaggctgcaggaagggaaaagagggtcatcagctaaaagtgaagctcaagacaagggtattagcattataaggctacggtgagcagtttcattcgtcatcatcttgtttctcttgtgtatgtgtaaacattggagtataccatcttcactgtttatttgatatcattgcagtgcagatctccagaatgccattgacagtgaggattacggtttggcagctaagttacgagatgaaatctcaaagcttgaggcagaatcattagctgtatctgcgaaagccttggcttttgagaaagcagagtatgcatttcgtttgggacagaaacttagacacaaaacttttggtacatcgttcatatgtattatctcagtgcttgtctcactttggtttacattcataatgaggaacttatgttggtttcgtttcgtttaggttaccgggctgtagtgtgtggtatggatccaatttgcagtgaatcaagctcttggatggaagctgcagaggttgaaaagttacctcgtggatccaatcagccattttatcaggttctggttctgaagcaaatgttcattaagatttaaagtgtattcatatacatatgaacaatctacagaagaaacatggatatcttaatctcttgcatgtgtctagcaggttctagtcgatgttcggacgcacccagatctactagtggcatatggtaagctctgagttttcaagtcctttggatctcaacatcttcctgctgcacaactttaaccactgaacaatctcactattacttgacaatggatctgatattgcagttgctgaagacaatctgttagctcctgaaaaacccgataaggtgagtagtctcaatatggacaatttaatccccattgcaactgtttgactcatatttctgtttggtatctgcaggaaaggtttgatcatccatacatttcttttctctactatggagctgacacagctggagatttcatccctgtcaaacaattgcgtgagaagtacaacagacctcggcatgaagttccttttgattcacaagacgaagattaagatgaaaacctaagagttcacaaccgcagactcgagcacaaaccacaaaaaaaacagaactctagcatagctcaaagcatctagcatccaacttagagatgttctgttggttttatacccatgtagatgtagttatcacttagcagttagcacgactgttcttgctatatacactgaaacaagtcaactttattcaagaatgctttgtgtataaatgcttctttgttcatcctaactgacttatccagaaaagccaagacaactaacttactgctattccattgtgctatggcctgcaatcttgctcagacctctttgcttcatcagatttctcacttctttagcctgattccaccgtccatccgatgcatacaaattagagacgagaacataataagaggcatcatcaggatgtaaatcaagcatcttcttaatcacaatctccccaagatcaaatcttgaatgcattccacatccgtgtagaaatgccccgaaacatctcacgtctggttggattggcatcttttcgatgatatctaaggcttgctcaagctcacctgctcgagctaacatatcaaccatacatgtgtagtgttttgttgaaggcgtgaagttataatctttgtacattgagctgaagtacttcttcccttcattaaccatccctgtgtggccacaagctgataaaatagatgtgaaggttgattcgttgggtttttgttgctttttcagcatctcctcaaatagctcaagggaccctattgtatccccttgctttccatagcctccgatcatagcactccatgtgattgtgtttttctcctctatagtatcgaagatgagacgggcagattggggatccccacatttggcatagaagtccaggagtgcagtaccaacatgaacactggatgatgccaggaaacccaatttcacggaataggcatgaagtgatgaacctacagctagagacccaagggaagcacaggctgaaaaaagactcgcaactgttacaccattaggcgtcacagattctgaattcatgcgatggaaaagaaacaaagcttcatggatagagccgttttgtgaaaacccggaaattatagaattccaagcaactatatctttctctgactccatttcaaacacatatttagcatctctattctggtaacacttggcgtacatgtgaaccagagcatttgcaacatttgtatcccaaataccaactttgatggagaggccatgaactgatcttcccagttcaagattctcaatcagaccgcaacccgataagacacttgcaatggtaacacaattaggcttgatttcaacccccttcattttctgaaacaagctcagcgcctcattcacacttccgttatgggtataccccacaatcatagctgtccacatgacaagatccacatgagaatgctcattaaacacccgacgtgcattgcttatgtcaccacacttaacatacatatcgagaagagatgtcaccaaacatgagctgagctctataccactcttaaccaaacaaccatgaaaccactttccttgatgtaaagcactaagctttgtacaagccattattagagtaccgtaagtatattcattacccaaaacattgttttccctcatccgattaaacagaaccaacccttcttcgcacaagtcgttcttaacatacccagcaatcatcgaagtccaacaaaccacattcctcaaagtaatatcgttaaacaccttatgagcactcttgatttctccacacttagcatacatatctagaagacctgtcaacacaacattatcgaaactcggcaccttaacgagctggcaatgtatcttcttcccattgtctaaatcctgaagctcagtacacgctttcaaagctttcgagaaaacaatatcatcatatctgaatccatgcttcatcaataaatcatacaactttacgacttctacactctctttattcaagcaataacatctgagcatgactttccataaataaaaatctggttcaggaatttgatcgaacaccaagcgtgcatctttagtatacccaaagaaaccatatagactaacgagcttggtggcaatcgagatatcacccatgagtccatttcccgttaaaactccgtgagattgccttagagaatcaatgttcgtgcacttacttagaaggagaaagcacgggctcgaagcggcgtaatgcagagaagacccatcattctcttcagtcaaaatcaattctttgatagtcgtaaaagagacgcatctcggtggaaacccgaatcttctagtcggagaaagagtgatagagcgtagcattgatcttcttcgccgttcacaacttaccggcggcgtggctttcccgccaggttgttggtctcagcgttttgtaacgaaaaatctgaatgggccttaaatgggcttataaagatctaaagccgttgatgtgtttcgcaactacatataacaaaaaatcacaaatcgtaatcaagatttcataatttaatcatgttgagctggagaaaaaaatcatggcataaaaacaattgattctataaaaaaaactatatcttttgtttgttttttctagtttttgtctctttcactatttaatatttgataaattataatatggcaaaacaacaaaacaaattgtaaataaatagctgtaaacgcacactccaattgtcaattgaaataaattattaattaaatgttatattttaatattataagacatataattaagaagttacattttttacattataagcgtcgataataagacgtatcattctctttttttatttgctaaaaatgttaatatttggttagaaaatgaaaaagttaagagttacaagaatataaaatttatagtttggtcctatggtaaaaaagaataaaaactatgaaagcaaatatcattcggtccattgacataaaaaaaagtaattaagcttctggaatcaatgaagcggtacaaaaattttgatgaatcgcatataaaacatctcaaagaggaagataatgctgtcaaacggcaaatgtcgaaacaataaaaaccaagtgaatggaagcctttcaccggtaggccaaaaaacactaaaccgtcaacggcaaaacacacatagcacacaaccagggactccacccacatcagtagaatacgattttatgaacttttcatgaattctctccgaacgaaccgacaatattatgtatgtaaacaatatttcaccaacctctcgtttgagcttgattaatcaatggatgttgtccaaaaaaaatgattgaacaaactaaattaacaataatatatctcaattggagtgtttgtttacagctattaaatgtttattgttaagatgttattaaatgttttattagtagtagtattcccatgcataagcgtttcttacttcaagattctttatacaataatgaatgtgttttttaatagcaaaaagtcgtgtagacaaccaaaatactactttgtaagagaaacgtcttcttgatataagatatatatactgacacactaattttgattgtattctatcgtcttctgttcttcacctagtaatttgagttacaacaacattttctttatttttctcttccattgaagaatcgtcaaagccatggttaggaaaccgtcgtcgaagatttattcggtggcagcagctgcgttggtgatcgttatatatgttgttttctgctccgtgtttgatcgtcaattgttacaatcgtcaagtttatatcaaggtatgcatatttcaaattacttcttcgattaagcaaataaaaatcttcaacatcttcttcttcttttgaggctgcgatcaaacacttttacactttaaaatagtagtatatattataattaaaaatttgttgcgagtagaaactatttggggaataaaatatatttttgttttagaaaaagttgtttatatattcatttttctcctttataaattaattttcatttccatattttaaatttattgtaacataaattataatagtctagtaaaattaaactatcaatcaccaaaactttttgccaaattatatatacatcattattattattattattattgtcaaatctccgaaattactaaatttcgcctaaaatatgattctccctctttttcagaaaatgttttacatgcgaatcaatgatcaaatcgtcacaaaatatcataaaagtatgttttataatttcgcctaaaatatgattcttcctctttttcaaaaaatgttttacatgcgaatcaatgatcaaattgtcacataacatcatgagaaatatattttgtaatttcgcaaaatatgattctctcttttctctttttgcttttctcttagtaaattcaattttgatattgttaaaatgatttaagtgtggttagaaatgataatcataaaatggtacacagatttcttctcacatttttttttttgcgcaataattttaaaatcataaaatgactcaaatcttttgtcataattttagcggttgacgtacaaaagaatagaaacaaaaaaatgtttagtaagattttaacatccactaaaaatgtttttttattatcttttttggctacgtactcttctctttttaagttttaactaaaaaaataagagaagttgtaggtacgttacaacaaccatgggaatctagaagaatcaagcaagccccacaacaaccgcaagagactacttcggcaacaatcacatgtgaccgatcccacactaattacgatctctgctcaatcaacggctcatgtaatctggaccttaaaaccggaactttgactctaatggacccaacatcagcaccacttgtcgaaaagatcaggccatacccaaaaaaggctgacaactggatcatgcctaggatcagagagctaacactaacctcaggcccattgggtctgccccgatcatgtgacataacacatgatttgccggcgattgtgttcagtgccggaggttacaccggaagcatctatcacgatttaatggatggttttatcccgcttttcatcacggccaattcggtatatccggaccgtgatttcatcccggtggtagtaaatgcaaaggaatggtggatgccaaaatacatcgatattctaggtacgtttagcaaacataaacccatattactactagacaaagaaagtgttgctactacacattgcttcacttcagctattgtgggcctaattacacattggcccatgacaatagacccaacccaaatacccaactccaaatcattagtggacttccacaatcttttagaaaaagctttcaccacaaacatatctactcctaaaacccacaagcctcgtctcatgttggttagtcgatatggtaacattggtcgagtgatattaaacgagcaagagatcaaagagatgcttgaagatgtcgggttcgaggtaatcatatttagaccatcgaaaacgacgaatttgaaagaagcatataaacttatcaagtctagccacggaatggtcggtgtacatggtgcggcattaacacacttgttgtttcttcgacccggttcaatatttgttcaagttgttccgcttgggctaggttgggcgtctaaaccgtgttacgaatcgccagctaagacaatgaagttggagtatctggagtataaggtgaatgtggaagagagcagtttgatagagaagtataacagagatgatttggttttgaaagatcctattgcttatagaggaatggattggaatgcgactaaaatgaaagtatatttaaaagaacaagatgtgagtttagatgtgaatcggtttagaaaacatatgaatgaagcatataagaaagctaaaatatttatggacataaacggttgattgattatgtattattgtaatgatttgtgacttttgagctgtagaataagatgtttttttttttttttttttttttgtgtttgtcttacttaaaacctaaaaaaactatctctttcactgttttatgatctagcaaagagagtaaacagctgtaaacgtacactccatttgagatatgttatgacttatttgttctattatagtattcccatacctcagcattaagaaaagtgttttgtttttttggcaaaaaaactttcaaacaattaaaaatattttgtaagagaaaagtcttcttgataaaaatacacatatactgaatcagtggtctcgtttacattctatcttcttctgttcttcatccagtaattgacttacaatttttttctttcttttctcttccattgaaggattcttaaaggttgatttgcatataaaccatggttaggaaaacgacgtcgaagagttattcggtggcgttggtgatcgttatggttatatatgttgctttctcctccgtcttcgatcgtcaattgtttcgttcgttaagtttctctcaaggtatgtatatatcaaattacctcttcgattcaaccatataaatcttaaacttcttggttgagtcgtaggctacgatcaaacacttttacttttatattacctaatgttttaacgatcgagtcaacatttttgcaataactcacacatacttggctggatttgaatctaaatgctaacattacgaaaccgcactaattctaaactccggtcaaaagaagcaactaaaagtaaatgataatgattttttagtctaatgaaaatttgtttcttgttagtttataattgcctttttccacgggattttcttgatgagttaaagggttacgtgataatttttttcttcttttaattttttgttaaaaggttacgtgatagactgctatatagttaatccggaatgttctataaatagaataatacaagttaatctattgcatgggaattaaattcctgccaataatttacttataagcatgtgaagtgtttcttcatttaataacttttgtttttcttgaatatttttatagtaaaaaaatttcttgataaaacttttttaatagttacttattgttttcttacaaatatttacgttgcgttttgaccaaaaaattgaaaaaagtttcctctgtaggtacgttacaacaaagatgggaatcaagaagaacaaagcaaaacccaaaagtgatggctgcatcagcaaaaatcacatgtgaccgatcccacactagttacgatctttgctccatcaacggctcatgtattctcaaccctaaaaccggaactctaactcttatggaccgaacacttaccacatcagcaccacttgtcgagaaaatcaggccatacccaagaaaatcagaaaactggatcatgcctaggatcagagagctaaaactaacttcaggcccatcggacctgacacgatcatgtgatataacacatgattcgccggccattgtgttcagtgctggaggttacaccggaagtatttatcacgattttatcgatggtttcatcccactttttatcacggccaactcggtatacccggaccgcgatttcatcctcgtggttgtgaatcctaaggaatggtggatgccaaaatacatcgatattctaggtacgtttagcaaacacaaaaccatattactagacaaagaaaatgcttctattacacattgcttcacttcagccactgtgggcctaatttcacatgggcctatgacaatagacccaacccaaatacccaactccaaatcattagtagacttccataatctcctagacaaagccttgaacccaaacctatctattatcaaaattaacaagcctcgtctcatattggtccgtagatatggtaacattggtcgagtgatattaaacgaggaagagatcagagagatgcttgaagatgttggattcgaggtaatcacatttagaccatcaaaaacaacgagtttgagagaagcgtataaacttataaagtcaagccacgggatgatcggggttcatggtgcagcattaacccagttgttgtttcttcgaccaggttcagtgttggttcaaattgttccggttggactaggttgggtgtctaaaacgtgtttcgaaacgccggctaaagcaatgaagttggattatacggagtatcgagtaaatgtggaagaaagcagtttgatagagaagtatagtagagatgatttggttttgaaagatcctattgcttatagaggaatggattggaatgtgactaaaatgaaagtctatttaaaagatcaagatgtgaggttagatgtgaatcggtttaggaaacatatgaatgaagcatacaagaaagctaagtcgtttatggacttaaacggttgattgatttttgtgttttatcgaaatgatttgtaagttttaagctgtaaaataatatgtttgtttattttttgtgtctatgtcactatgtgggtatgagagcaccattaattattggtagttgcttaggttaattcttagaaaagtttggttataaatttaatgtttttaatcatatatttgttaaaaaagtctcttatataagagacaaattgaagtattcttagttttcgtttcaaaaaattaaaaatcaattcataaaaaattctaagaactaagttaacagtaatctaagacactaacaataatgatgctttgatgttcttataaactgatatgatcttaataaagtgaaccaaaactaagacgaaattttatattttaaatcatttgtgtcatattggtgacctatagattggttcaatgatttttgaataatttttcataattgcgatgtaattagtgttgcttgaaattattgtcagcttcttatatgagttttttaattggaccccaacgcatctattttattatccaagtttatttggcgttgaaactaagcttgcacttttctttatcttctttctaccttccgaccataatttcatttatcagaaaaagacagatgcactttaacaaacaaattttaatgttgccaaattatgcattttttttaccattaaattttcatgttttacttattgttcctgttgattttgcttcgattgtaaaagaatatttgcttagatctacgagactgaaacgagttccgttgtaattcgttttatattttttaataataaattccggtagaactttctccgtctatttttcatttttcttatcaaaaaaaaaaaaaacaaattttaatttttattctatttttcaaataatcaagttttcaaagaaaaatggaaacttgaattttagtaatttcaaaattcattagacggttagagagtcttcatcattgtttaaacatttccttaatttgacatttagccatcaaaacggaaatttagttggaaaataaagtaaatgacgaagttacgtaaatgcccccggttctttcatatttcttcaaaacagtttttggccaatggagaaagaaaaattgagagtcgccacagctatcactctgctctgtcactttgtcttttactcagagaatcagagacagagagagaaagagagagagagagagcgaggggaagggaaatggagaaggcattaacgaaagtgacgagctttaaagtgggaagttcatggatctctaagaaagctaaagaagagctctcaaacatcaccaatgacctcactgtgagtgctccttaaatcgaatatcttctttttgctttgtctctgatgttcttgcatgcgtttcctctgtgaaatcgatggctttttgttacgtttggtgtaatgtgttgattaaaaggcgattcttttgtgaaatcttgtacttgtatgtttcgaaatcgtagaagaatcacagatctatgaagatctgagatgggttttaccaattaaagatgaaaattagttaacatcattagaattgttgatacatagtccttatctcagaccaattttgatataaagttgagatttttagcaatttgatgtagaaacaagttccaattttaccaaattgagatttttagcattagagagtctttatactagttaactcaactaagcttgtttctcaatttaaagtttccattttaagccattgtttactagaaaagatgaatcctttttggtaataatgtgttcatgttctgctttttgggctaagagctctactaagataagcctagaaaaccagtttcactggatttgtgttcttgagtttgctatagttgtgccaagatatctattctaagaccatttttcgaacgtatcattcgatttatcttcttaactaagtatcagtgtgttcgtaggctagttattcgatatttggttgatttgcattgcctcaaatggttatatgatgttcatttttctcttccagacattctccagtacggttgaagagaaagcaaaatggattttcaacaagcttaaaggtaacaaacaccattttttgtttatctcatggcttatatataagaagatgcgaaaattcttaacttgcgaatttgttttctgtgttctctttataacaggaaaaccactgaaaagcttaccagacctcctcaaagaatacaacttaccaccaggactcttcccacaaaacataatctgctacgaattcgatgagacgaagaataaactcaccgtcttcttctcttcaccatgtgaagtcacattcaaagatggatcagcgataagatatgcaacgcgtgtgaaagggattttgcttagagggaagctgatgggtgtggaaggaatgaagacaaaagtgttggtgtgggttaaagtcacaacaatctcagtcgagagctccaagtctgacaagctctggttcactgctggtgtcaagaaatctcgatctaaggatgtttatgacacacctcatgatgctatcaaagtcattggagagttctaaggatttttttcacaattggttattatcatatttgattcatgaatttatttggggttatttgcattttgggaagaggtatacttaaaggaaatgtgtttatataactctcattttcctcctttatatgcaagaaatcacaaatctttatcaagccatagtaccgctaaatattactttgataatgatttttaatcggtagtaccataacaacaatatcaaaccattgtatagagtattgtttggtttcttgaattggtggtaataaggttccacatgttaaccgtaaaagatattgtttgtaccaacaatgggtctcaagatgccatcaccatggcctaggtaaattgtgataaacgtggaggtgacaattttatcaacctttaagtacataattttatgtgatgatcttcttcttctttttattttagctccccctagattgagctggcccaaacggccagacctaaacaatatttgtggctcatttttactcaagatttttgttaaccgaaaaaagaaaagctttaaatcataagattcttttttgtgcacccaattcataagatttaaaccactgattttcaaataaatatttggaaacttaaaaacaatatcttttaagtgatcttaccgagctcaaacttcacttttgctgatggtttagcaaactaagcgttttctttatcgcttaattttcattcgtttgttgtttaccgtatattgttaagccggttttgttggaggatactaatgggcacacaaactccagaaatgtccgattgtaattttctacattttttatttgaataaaacatagggggcaactgccttctatcattcaccaaaaaaaaattcactcttgctttgctttatgttcggctaaatatgaaactcacacaaaatctatcagtcctttttattgtcgtcatactcctttctttttttctataattgtttttaatagaaatgtgctgggccggccctgcaggctagattttaaaacatgaagctttgtactaagaatctgattttgcactattacacgatttactcctttcgtatattctctctatttttttacatattcgatttacacctttgtttccgtttctatgttttatagtgattttttttttttttttttcacatgttttatagtgattttttataaaatatttgcttggctttctcgatgtgataagtgaaagacgcgattcgttgtggcaatgaatgaaaagggccccatttgggtcctacagatattaaggatgtattgtctctttggcccgttttcaaagttacttgggccctccataaagtcaagttgtgttttcattttttgtttactccatcttctcacgtttcctctttcaccattttaccaaaaaaagttacttattatttaccaaatcaataaactccataaaatcatgacgagaaaaaaatataatccataaattgtttcatttaggacataaaacagctcttgtgagttacgattaggcttaaatcgaccataacttccgattcattttatgtatacgtggcgaaatgcaatttgtagaacgtggtgaagacaaattggttataacccgtcgagtcgtgcttagagctgctggttgacttgcgaggcacaaaccatcgttgtctcaagggacataattgtaatataacacattaaaccgacgctttttataaactactttcccttattagccaatcataactcaacgattactacaaaaatagacgaaataagacataatgaataaataaatatgagaaataaaaaaggaaatctgttagatccttgtcttcaataaaccactatatacttccaaaaaagttattatagcttatgcatttgtttttgggttaattcgctaaaaaaatcaaacatttgaagttttgatgttttttattctgtcttaaatttattatttattataaaatatgagaattgttatatagacgattttattatagacaattccttctgactctctttagatccacgacaaacgttacctttttctcattttctatgattttgatgaacactttcaatgattttccctgcgtaaaatcttgacgaatgactataattgtacatcgttggagatctcctgcatacttgtctctattaatctatcgaagttttgaaattttaaagtttgtgtataaaatgatacggtaaaaaattataactaaaatgaataattgattttgtgcatattttacaaataatatgatatcatgttattgtattttattacatgttattttgcaaagaaatctctatattttaattatcttccaaattaacttaaatgttttatgattttttttttgtttaatttcttatgtaagcaaccaatgcaaatttaaattcatgaaatactttactttcttttgtagcattcattacgatgtgtcattttttttgaaaatcaaaaattaataagaaaaataaaatggataaaatgaaaaagacagagagtttttactctatcatatctgcaccgcagactttatactgtaaacaaaattttattcatatttttcgagatctgcttgaagagacaaacacaagaaaatcacaaaaaaaatctctcccattaaaagactgcacaaagaaatattttatacaaaatgaaagagagaaacacgacacgaattttgtataattaagattacacaaaaaaaagtgttagaaagagaaatatcttcttcttttttctgtgtgagttgggtttgttaaagttttatcctttttgttctcaaaatcaagaatcgatggcggagaaggaagaaaaagaaccatcgaagttaaaatcatccaccggagtttcacggccaacgatttcactacctcctcgaccgtttggtgaaatgttttttagcggtggcgttggatttagtcctggaccaatgactctcgtctcaaatttattctctgatcctgatgagttcaagtctttctctcagcttttagctggagctatggcttctccggcggcagctgctgttgccgccgctgctgtggttgctactgctcatcatcagacacctgtgagctctgtcggtgatggcggtggaagcggtggtgatgttgacccgaggtttaagcagagtagaccaacgggattgatgataactcaaccaccggggatgtttactgtaccgccggggttaagtccggctactcttttggattctccgagcttctttggtcttttttcacctcttcaggtgtgaaattcgttaacaactaaaaaaactcaaagctttgtttttttttgctcattgtttgttcgaaactctgtttttggtaaatgaaagttttgtttggatattttgttgctgtttctggtttttgttttctttcggtttatgtctttatggatgcaaatccaaaccattttgctggatagagtaagagaaacaaaaaacaaaaacaaatgttcttcatttttaggtcaaaattgggaagttttgactttgagacattatggatgcttttttgggtatctgaatctttgaatggaagaatttagaaagtaggaatctttcagacaaagaacaatgtcaatgtcaaagagagaaacagagttgtcgtttagaactcattagtattgtttcttttctaaatgttgaatctttaaatgtatttgcttggaatttgttaccttgtcttttgggctattagctgataatagaaatgtgaattatgtgtagggaacatttggtatgacacatcaacaagctttagcacaagtcactgcacaagcagttcaaggcaataatgttcatatgcagcaatcacaacaatctgaatatccttcttctacacaacaacaacaacaacaacaacaacaagcttcattgactgagattccatcattttcttctgcacctaggtctcagattcgagcctcggttcaagaaacatcgcagggtcagagagagacttcggaaatatctgtctttgagcatcggtcacagcctcaaaatgctgacaaaccagctgatgatggatacaactggcggaaatatgggcagaagcaagtgaaggggagcgattttcctcggagttattacaaatgtacgcatccagcttgtcctgtcaagaagaaagtggagaggtcactcgatggacaagtaacggaaatcatctacaagggtcaacacaatcatgagcttcctcaaaagcgcggtaacaataacgggagttgtaaaagttctgatattgcaaatcagtttcaaacaagtaatagcagtctcaacaagagtaagagggaccaggaaacaagccaagttacaacaacagagcagatgtctgaagcaagtgatagcgaggaggttgggaatgcagagactagtgtgggagaaagacatgaggatgagcctgatcccaagcgaaggtaaataagaaaaactcatgagactttactgttcctcttacattcatctcttgtgtggttttggttattctgatgagatttaaacaatctttgaatgttgcagaaatacagaagttcgggtttcagaaccagttgcttcatcgcatagaactgtgacagagcctaggattattgtccaaacgacgagtgaagttgacctcttagatgatggatataggtggcgcaagtatggtcagaaagtagtcaaaggaaatccttatccgaggtaagactaaaacctggtcatctagttcaagatagtcattggtctttcttgtttccttaatgctctttgatctaatccacaggagctactataagtgtacaacaccagattgcggagtaaggaaacatgtagagagagcagcaactgacccaaaagctgttgtaacaacatatgaaggtaaacataaccatgatgttccagctgctagaaccagcagccatcagttaagaccaaacaatcaacacaacacctcaacggttaacttcaatcatcaacagcctgttgcacgtttaaggcttaaagaagagcaaatcacttgacagagaagaagaatacgacggcgcttgagcttttgtgagtttaatgaatcttctttttggttaatgaacctgtttttgttgcctcaaaacaccacaggtttctctggacagaatctctgatattacagtttcaaaaggtatgttcttttatttcatgttggaatcttctgtgtaatcttaagaagctttaggaggtaatgtaaaaaaccagattcaaagttatgcccttatgtgaattcttttgtacatgggataaacaaaatttacaggtatcctttttgttcttgttgtaataggttacatttgtggatgtatgtttcttttagtcatttgtatcacaatgtctatacaaatgaaacctttcaccgaagattaacaatgcttctagtgggattctgagtaatctaaccttagctaaattaataagaaatatgccaattctgattcagattacagcagtttgcaagtctcaagaacagtaaagaagaccaatatacaagggttacaaacttgcattatcatacaagaagacaagtttttcaaacactaccttaaaacataacaacaagaccttaaactcatcatcatcatcatcatttgatcagatgttgttgtaagctacagagaccaagtgaggaactttaccatcatcaaaaggcaagctaacatattctctagcaaactcttcagctatctccccaacaagctcaccatgaacagctttacaatacatatacatcacagtagtcgccacaagattatacaacatcaatagcgttagcaacgcggacgtgatccaattctgtacaaaaaagaaagaacctttccacgacttcccaccattctcattatcgttgagcagagcataggcggctaaggtactaatccaaacgagaatcgattccgttgaagcgaagaagaagataatcgacaaagaagcacatttcattcctttaaccaagcgtttacttgtcttcaacggtgttataccccaagccgattcaacaacaacaacaacccaagcaagaatccaattcacatagagcttaaccgcaaccgcaatcgagataatcgttactagggttacgaaaccttggaaatacgaagaggcgtaatcgaattctacaccgggaatgatctcaataagcttaaccaacaagaaagctaaaatccctggaatcagaaaaccccctaaaacgatgagattcgatgaggtcaaagtagcgagaagaggtaaatttcactgcagatttcaatgtcacaggtctaccatagaatccttgaaacacactataagcgattgatccaatagctaagagatagaagacggtgataacaacgatgaaaccgattagaattaagacctttgttttggtatcgatgtcatcatcgttgttgtgagtagcgaggtttgatcggtgatgagaaggaagacgtaagggtaaagtgtgatgaagacgctgagaggaaggaggaagcgaacggagagatctaggaagtgacgagagtgtgcgttgatgattcgttttgattctgataagattatccagagattcaatggaggaggagatagagatggagtcgccattgaagcgtaagttagtagaagaagaatcgaaaggttaatgacgatgaatttacttataacgataagtatcgatatgattatcaatcacttctctttatctataagataaaaaggacacattatttttttctaaaatatatagagagattaactgtgatgggtaagaaattaggtgttattaccagaacacgacagaaattttttaattactgttatattttcgtgtttttttattatccagcgtgcccctactaaacgttaccggaaaaaacgtaattacagggaatgccactgccacgtcagaatttgctgacgtggattaaatgaactcagccggctgagttacggtatgttgcggttgacttacgtcaaaaatatatgagtcataacaaaacggcgaagtataagtataactcagccagacgttacggctgagttgaaaaatgttgcctgagttatagtataactcagacaacggtatggttgagttaaggatgttcggccgagttataagaagttatacgataacccagccaacaatatggctgagttatgagaaaaaggctgacttatttcctcgacgcggccgagttatagttttgattggcttagttatggaaagatgtgacagctgagttatggtcgagtgatataaatcagccgccaatagctggattacgatataactcagccatgttatggctgacttatttttaaaagattaattactataatatcatgcagttatggccgagttgttgaacgttacggttgagttagttgagttacgacattacacggctgacttaactttattttttttccttttttaattactgtaatagtattcatgttgcgactgacgtatagatttgcttgatggctgagttatcaaatgttcgtttggtggcttagttgccacctcatcaattcaaaacgacgtcggctgtaatattccatgtcatcattccatgtgcatcatcaaaggataaaaaaatagggtaaaattttttcaactcgtcttcttcacttgagtttttcacatcaccggaacttctaattcctcatcgttttcctcatttttcttcaatttctttcatctttctcccgatatggttgatctagttttggtaattgttgtttccaggaattgggtatagaaacaaaaatacatatttaacactaatgaaagagggtgtaaacttgtgcagatagatgcgaaaacaacgcacgacaaatttgtgaagttggtgctcgatgataaagttagacaaaatgttgtatctcttattgtttcacgacaaatttacatgtcacggctgagttatatgcttaagggaagacgaaaggtttagtcaatttacatgtcacgactgagttatacgttccaagaaagacgaaaggttcgataaaattacattacagttgagttatatgcttaaggaagaacgaaacgttcagtcaatttacatgtcgcggctgagttatatgttccagggaagacgaaaggttcggtaaaattacattacgactgagttatatgtttaagggaagacatctataaatttacatgtcacggctgagttatatgttcaagggcaaacgaaagatgagtgtaaattatatgttacggctgagttatatgcttcagggaagacgaaaggttcggtaaattacatgtcacggctgagttatcatttaggaaagacgaatggttgtgtaaattatatgttacggctgagttacatcacgttacggctgagttacatcactttacggctgatttataatacagatcggaaagcaacatttttctggggaagacaatatgaaatttattggccaaataacaacaatcaaattaagaaacgtaataatctgtttgagggatacataggaggaagacgaaaccatatgaatcaaaacattgatagaagtagaaatatttctaaatagatcgattgagaggaaaactaaacgatagacatataaaatcaaagtaaaagagtagttattcttgattcaactaaaacctgtaacaaatcacataaaattccatagatctctttgatttgggtttcgatttttgatgacttgaaattcgacaccaccgaaagagtttcggccgaaagagacgagataagtagagaacggcgatgaaattagggttccgtcgactgaacgagagaagagagcgacagtttttttttttttttttttttttttttttttttgcgcggatgaacagtaagatgtgctgaaaaaatgagaaactgaaagttttaagggaatttttggtttcggatgacgtggattagggtaaatgacatgaactgatgacatggataatcactgtttttttatttattttttaattagaaacgaatttaataataatatttaattaaaactaatcaagggtattaagtgtaattacacaagtactgaaaacatacgaataaaaaaaaaagatgtgttctattataggaataaacatacaattgtgttctattctagtaattatttcaaatatgtatgatgtttatttattacttcttcactaaaatatggatgatatttatttattattttttcgctaattaatttattttctaactaagtaaactctattatatatagttcattttattcattcattcgtttataagttacaaagaaaagagaagagaaatagaaagcaataaaaaaacttttgttttgagttttactctctttagtttttattattcttttttattttaatcatttaaaacatgcttcaagatattgtatttcgggtaaggttgagtcgggtcaaatcggatcggatcaaacctataataattttttttgtgttctataaaaactttttggacctaattttttttcttgtactgactgattttgtattttcttatccgatataagatatttgattatttttatttttgtgatatttatcggaatttatatgttcaatgctgagaatatttatttgctttatatcatcaggcatttgagcaaaaaaaaaaatatacaaaatataattgagacatttgaccaaaaacaaatatatacataatttagacaatttagtgaactatgatatcattatgttgtttgttttttcttaaaactgtatccaaaaatatcatgaagagttgtagatacgataaaacttttataaacatatgtttaaaaaaatataattaagacaatttagtgaaatatgattatagtgacttgacttcatcactaattttttaattatatcaaaagattttggtattgtttcatgtgaagagttctaaacgtaataattaactactgctaaagatctgctaaagatacaagaaactataaacatcagatatattgcaatgaccaagcttaacatcaaattcgtgagtttgtgtgatgtttctttaaaatgattgtggcgtacgtatcgagttgccattttttacatgagacgtatagtctcaatatagattgatccaaaatttactattttttagtcttaattaacttagataagatattttaatggttatatgtcctctgttctaaacacaatctactaggcatcaatcaacattgttgtataagctacgtgtcttcaaggttgagtcagtgaggaatattttggctgaaaccaaatctggtttattgttatatttgacatgattttgaagtgttgtgtaataattttagtattgctctccgtaatctccaaatacatagtgtgatcatgtttactcactctagttctttgccattctcatgacctaattttttttattaccaatgactaacttagtgtgatcatgtttttactcactctatttctttttttgttaaaggggtttcttgcattagaattaaaagaaatcaaagtttacataggagccttaaaccatagacttaaaacagaacataagaagggaggaggcaagcacaaatgctagataaggagagaagaaattaagaattgccgagagaacgtatgcatccggttcccattccagttccaatgcgtttttgatcctccaaaagtgttgtttgccattatctcctttcatatttgtaatccacagatagtcatttccattgatcatactaatatcttcaagacatgacgcctgagaaagaatactaagtttgatgactcgaaacatctctgtgtgaagattataggcaagaaccatcttattttgagtgcgacaataaacccatccctttgcacatattgttccttcttcatctatgtgtaaatcatgatcataaggcgtataatctatcacctacctccatttcttgacctcaaagtcgaaaacctcgcatgatgagatgttgttacttttgtcatcatgtaaccaaactagtttgtacgttcctgtaacattgtctttaccaaatcctaggaaagggaacacctttggaagtggcatcttattgtccaaatactttagctgagtcatggaaagagggaggttttgagaccgtcgcatagatgggtttgtcacaataattggacttatcaaaatgtcgtggtccaagatgcagacaagcccgtcgcaactacccataactctgacacgttccttgaatcgatgttggatgtgatgaaccgggccttcttcgacagctctagtagaagaccactcaaacctcatagtcttcatatcaagactctcacactcgctttcatagattaagagaaatttgggttcttgggtttcctaataaagtcaaaatctctccttgaaagacttcgactctatcgtacacctccagtgtttagacacgctttgaaatccaattagggttttcacgggaagtctcaccattatttcttctaacacaatgttattgatgagtatcatctcaatatatatgatggatttgtctctgtcaaactacgaattacaaaccctaaatcctgcaagggtcacacctttttaccacgcaaaacaatgtcctgaatataaagtccaaataatatatttaagcccatcaattttattatcatatgatataattttatcatcatttccacgtatatgattgagtaaaaatgtaggaaaatccgttgagttcaaacaaaatattgttttaaggatcacccttttttatatattatcttgtaattttaaatattgtagtataagatagaaaatctatatacatttactgaataacgatagatcgtagagaattagatcgttcattactatgtgaaatagaagtagtagaagaagatggaagttcttgtgatgtcggcgaaacatttcttatctcttgtgcttcattgtccataaagacaaagtctactcgaccttgaggtgatatcagagtagtagcagcagcaataggaaggtttggttcctctgctgcttttcggaagctaagtttttcagaaacttttgaagctgaaaaggataaaagataaattaagagcagaactatacaaaggattatatatatgtaatgtgatatataataaaataaaacacaaagagaaggtaccgatatatgttaaccattcatgcaatattcttggaaccattttcacctttaagtttttatctaaattatgaatgtagagaagacgttgtataagaaaagtttggaacataagttaatgatataataatataatcatgcatggaatttaattctgatcatacccatgcacagcacgaaataataaacatgcgtataagtattaattttaattaaattaattaacatgttgattgtttaaaatttcatttacaattaatctgtttattaaatatgaatatatatatatatatatatatatcagctgaaagtactttgaagtttatattactactaaaatatttatagatttattttaaaatttataaataagaaaatcattaattttgaatataaaaatacgagagtgtagaaaccaatagtgtcattatcattctattagatattttgttctcaactagcaaatgaaaatattttgaacacaacaacaacaaaaaaaaaacagaacattatccaaattatgaacagagcagaggcagagcaagaagaagaattcagtgaatgggtagttgttatacaaacctcacccaaatccccacgtactgacgcatctacccctccaaactcaccgatattacaaccaagccaccgccgtgaaaatccaacgatcaacgacgatgatgaagattctgttgtcccctccaccgtgaatctttggcttccgtggcgagtgattgagactaccaagaagcgattaatcaagaactcagtgtgcatctttcaggccgtcgaaagggtgcgttgtagttacctaactcgtaaaagggtattttggtcattaacaatcattggaggcttctcgttggtcttgagccttgtttatgtgaagctcgtgagatggtggagacggctacatgaagagaaactgagatttctgcttcttctcctcagagagaaagatcaggtttgtgttaactaattctgagcttatagagctatagtaatcttaagaaagttttttttattggaaattatgtgattttgtagagaataaaggaacttatggttgaaattgggagattgaacgagttgttatcatcacgacgcagagttcgagtggttcgaatcgtgtaacgagacgagtgtatatatgtatgtattagaagagcatttgctatgtgttgtgtgattattatacagacatatatagtttcacgtgtatgtaagaagatatacaaatatcaaagagaaatagagtgggatacagtttatgcttgatgtattgttctgttttatatatgttgcttcatgtttgattaaaaaaactaaaatgttatgaagttttttgagtgtcaaaatgcataagatattgcatttggaacaatcaggtcacaagctcgaattccgagtcgatggagaaatacatgaaggttttttgagtgtcaaaatgcataagatattgcatttggcaataagacattatcttttgaagggagattaaaaatgattttttggtcatacacaacaccattaagttatgatgttctgttttgacactacctaaacgctctctgagagaccttgaagcttctgttacctttaaagtagagtcatttccaatagtcgcatgcaagattaaagttgattgtcagaggggaggcagaaaaaggagtattgggtctaagaggcaccgcaagaaggaatgcggtctttatatgctgatatgcatatgctctttgggtagcttggattcacaagttgttgtttaggagacgatccttttggcctaaaaaaccagaggttattaattagttatagatttggagatctctactttgcaccgtgatatgacaatgcaatttagcaaatgccactaaagagagttgtgaccagcatatttctaattttttttttttttggtcatgggaccaaatccttaggtatcgcgtgtaaaacataaacattttcattttatgaatacttacattcttaggaaggaaaacaaaaattctaagtgtgtagtttcattcaatcttgcagcctatcctcttaaggaagtttcgccatacattacgttaaagtatgtgaaaacaaagaaagcaagacttcactttggatgatgcaaaatgttagaaaacaacaaaaacatgatgcaaaatgttagaaaacaaatcttataaaatagtattacaaatttgctaaaattatatatatgggtgtcagggtgtgaaaacaattgtataaagtagggctgggcgttcggtttttcggttcggttttttcggttttacggtttttcggttttacggtttttcggttgtaagaaaagtgaaaccatataaaaaccatatgaaattcggtttggttacgggttggttttaacttttttttggttttagaaaaattaaaaccatttaaaaaccatatgtattttggttcggatcagttccggtatggttacgtttttttccggttttttcatgtttttaccaaaataacagcaattgtatagagttagtaagttacaataaaaccaatacatatgccaattggcaattaagggattatgagatctatttttagcaaaagtgccaattggcaattaagggattatggtttacgagtaaaggagacgaagaaaagggacgagatcacgttttttcttctttaaaagataaaaatagtttaatatggcaactcttagctgacgtaagtacgtcacccatggggccgtctttaatataaaaatagtgtaggaatttgtttttttctgtggaggcttatgatgatgtggaggcttatgatttatatgtgaatttcgtttttttctgaaatttttttttttattcattttctttcatagtctttttactattttagctaactacctatatttttcaggagtgattaattttgcaggttcttcgtgattatgcgatataattttgcattaattttgtaatcttatatttttatatatttatttttaattttacaattattttttctttaatagtatcaatatcgatctctccattaaaaacaaatttattactaatatcataaaaattctcaaacaataaataaatattaaaattaatactaaaaagttgttcttagtgaaaaatttatgtacatgcttttagtgatgacgttattggatctgctcgacgactacgctcgtatttgtaatttgtttaattattttaataaaaaaggagactattctccagattatttatttattttcgtgttttgtctccagattccgatggattcgtactatagtgtttttaatgcagacgtcatgttgcaaataagacactttttggtgtttaaataacagcgcatgtgttcaatttcataggtatctcccaagtccgaacgatgacattcttctctcccactcaggtgtttttgaactacaggggagaacaactgcgtcgcagcttcgtgagccacctcattgatgcctttgaaaggaatgagatcaacttcttcgtagacaaatacgaacagagaggcaaagacctcaaaaatctctttcttaggatccaagagtcgaagatcgcgcttgccatcttctcaaccaggtttgtactattctttcaaattattcagaagattcaagaaaattaatcatccttattttgatttcagatacacggagtcaagctggtgtatggatgagttggtgaagataaagaaacttgctgataaaagaaagctccatgtcattccaattttctacaaggtgaaggtagaagacgttcgaaaacagacaggtgagtttggtgacaacttctggacgctggcaaaggtttcaagtggtgatcagatcaagaaatggaaagaagccttggaatgtatccccaacaagatgggtttgtcgttgggagacaagaggtacttatccacttacattcactaaatcttcttcttctttttgtatagaataagttatatattctttttttggcagtgatgaagcagatttcatcaaggaagttgttaaggcggttcagtgtgttgtagcaacgattggacttgaggaagaagagaatcattttgggaaaaagaagagaaaggattgcaaatgtgagcttcctgatttgaagaaaagcagaaccaaaaagttgtgacgtaagaaaatgttttgcaatttgtatggatatggactctcctttctagttgtgttttttattgaagggacattaattttctctatgtgttgcttattaatttttaacatattcagattaatcaattaattaaggtcttatatcatcaccattctccgtttctcctgtaccacaaacattatattacaataaaaaacaaaatccaacttcctcatttgctttttttaagtttgtgttatatgttgctaaaatacaatctagtgtgaaatgatttgttacaatttcctcattttcttttttaagtttgtgttatatattcattattcactgacgacatccaaagttgaatccaacggtaatcaaaaagatagactacaatcttctgagcctctgtttttggatatgtgacttttagtgatcttttgtaaatcctaaaaagttaatactttagaatatttttctaatacttttgtttgtcgagtttggtcatcttgatttatttatgtttaaccacacttttgtcatatatgatgatgatgcgtcaatagactttgccgcataaagactttgccctgatgtcttatagtgagtgaagaagggtgggaataaaagtcttatagtgagtgatgtaaggagttttataaaagtgtttatttccacccgcataaaagtttgatagcgagtgatgtaaggagttttataaaattgttactcactatcaaaagtttttttttttttcttttaacatcactcgcacacttatccttttatagcattgcagttttatcactcgcacaacttgaaatgactaactgatttaattaatatagttagattttactaattaatggttataatgaaatttcaccattttgtttgattgtacggttcaaattcacaagaaatcgttttaaattacagttcaaatgttttatttctaattgttattttattacaatattgttaagagatcgatttaaacttatgttaatcgtgaaaatattatttttatttgtatatatatttactttcacgtacatatatgtatatatatatatatatatattaggtaaaacccgactaaataagcagatttaaaaaataattataaatttttaccgataatatttaaaatctaaataataatttcttttttaacaatattttactttatataataagatcgctgttatccggatcactaaaacttcaactaagtcgctttagaagtaggagttattccgttaaggctgcttttaaagaaggattgaagaatattagaaggattagattttgtaacactcagaactttgattctgcttttagtgaaaatctcatagatatgccaagaactctcgatcacaattcatagtcgagaagaaacttaaaatgatatttttctattttcttctttgcgagtgagcagcgagagagaatcaattcaaagagtacttcagtaaaatataaaatttgatcgtagattaattaacatacgatcttttattgtttgaggaattaaaatcgaaacatactcaagagaagtcataagaatgaaagatgagatatatagagagccaaatgaaccttttttgcataatggattatcaaactcacaaaatgtatggtttaagcttaacttttttgttaaagtcgggcataaagacaattgtgttggtgaaaaaacagttttttctctcgccatagacgatttctctaaagccaccggttcacagaaaaaccgatgtcaattccaaatcagacttgggtcacgcctttggggccattcgtggtttggttcatttctcatttttttgggatttcagtgattaatatgatagagtcatcccacatccgttgccactcccatcttataatgttgattcgatggaatcatgttgtctttcttcatagaaagtttgtttccggtgtgcttgttcattgccggtggaatttccgggtaatgtactcttacccaatggtatggagtttctacattggtttttgatcccgaaatcaatggaggaatcaatctacttgatggaatcagaattctagatcgaattgaatttcttatgacgctaacattgtctaaagatggtgatgtttactcattaccatggttggaatatttgctctcgtctattgattctatgggatgtggagtatatggttctaaaattaaggtggcaactttctttgaggatgatgatgttgactacttttcatggacggaagcctctctcttttaccggttggagattgttttgttcaattgaattgtctttggtataaacccaaagaagacacgagcgtgacgggaaggaagatggcctcaagtgaccgtgatagtgatgttctctctttctctgggttggaaaatttaactgcaatgaaaggagaaatcaagatcacaaataggcaacgatgcgttaggtgtttccagcatatcatatggagtttcaaaagacaagaagcagaatcatatcaagcaacaattcaggtttttcttttaactaaagtaatgcgaaaagtattttggagtttcatctatatggtgatagccaattacgagtatgtaaaggagggacgtaacagatttatctgttagcctgtaaggcttccgatcggcaagcatggtcaattccacttctttatcgaaattgttttcaatttcttttatttgtgtcaatggttgtatatgagtggtttatatatcttgtaaaactttttatgatgtaatagatttgattgccggaaaaaaaaaaaaaaaaaagcttaacttttattcattatgagacatgaactagagtatatggctgttgttcctggagcatatcaaggaaacttaaaagacagataactaccaacccaaaactcaaacacgaaattgagagacaccaaaaatcatcacaagaatttgctttctctttgccttaaataaaatatgaaatcagttgtatacccaaagctatatatatagctctctaatggtcttatgatcagcaaatgagtatgtgtgtgcatgtctactacttagatgagtttctttttctcaaagaaagttttcaagtgccagaattgtagaccagccaccgataaacaaaccacaagcgacccgaaactcaaccacgccatcttcgagtttgtggatctattcagttcttgcatttcctcttccctactcccacaaaaccaaaacacaataacaagtattaattaacctcatcatatatctctctctcttccgaccaaacaaaaactaaggcttaaaaggtttgttctttgtctgttacctttcacgaagataatacatctcctcatgtatggaaataacagtatccatcaaggtcttaacctgatactccatcatctacaaaaacaacatcaaagatccaacaacaactaggtttagtaaataaacttttaaaatccacaaactctctacactatcttctctcattttcacattcaaaaccagacaaaaccctagctcctagcttacatgctcaaatttcatcaaaccaaacacaaactaaaaaaaccacttacatcaacttgactcttcttagccacattggtccactccttagagtgaacaccagtcttccaatcaaaatcaatagtcaacgtggtctccggcttataatcaatggcagtgatgcacgctacgtaactcccattttcataagcagtaaacgagaactgaccagcctctaccttatcggcttcgtgcaaattcttcccttgtggtggcatcacctacaataaccacaagataacaaataatgttttaaaaaaaaatctatcaattgtgagatttgcgatgaaatctataccttgacgatgatcttgtgagaatcaggaagaggatgattatcttcgttagggtttacgatgaagtatttaccaatggacatggcgttttcgtgaatctcctctccgatacatttcgttttcgaagactttagttcgtaacgcattgatagtgtcctaggagataacaacgcaatgatcaaaagcaaaatcgagcttcgacaaagatccatggcgtcaccagaaaagagaagagagagagagaaagagataaaatcttgcagtagtcaatgtttttttgccgtttagggtaagacaaaagagagtcaaagacgttctttgcacacgtgtaattatttaattggtgaagacacgttgacaagtcttctttgtcatgagcatattatgggctttgtatatggaactgggcttagttttgtaatgaactttcacttggcacaatatttgggcttacatagattaatatatccgaaatttaaattttaaattttcaatataggtccgaacattcatatttcatatcggattaggttagaatttttttgtatttggataattcggatgaaaaagtttattaaccattcggattatatgactattcggatttgtatggatttcaaatcagtttttgagaaaaaaaaactaaaaaattgtttaattttaatcaaaaatcgtttaattttactaaaatttggtttaattttgcaaaacaaagtaaaattataacaaatagaactaaaagaaatttggatattaaggttatagcgaatatttttgttatttagtattttttgggtataaattataactaaatatcactaatattttaagatatataattttatttcggattacagatatccattcggttttcggttcggattgaattcagttcggggaatttgggtagaagaattcatcatctgtttgggttttgtgactattcggttcggtttcggaaccggattttttggatcggtttttagatttcggattttatgcccagccatatatatatttttttataagctacagagatgatgatgatgatgatccaaaagagagataaagatgagatcaatctgttgggattttcaagtttttctaattttgaaaaataccatctttgcaaaaatttcgattgttttcgaataatcttatataaaagtaggtgtatttcttaagaaaaattcaattttctcacgggaaaagaaacataaacatatagaaaaaaaacaaaacttcgtacggtcgtatctgtattttttgtccgcacttgtttcggtcactaatttcataatttcggagaaaaaaatccacaaaagtttcaaacttttggcaaattaagcggtttttgttaggttttaattattttttccgatgatgaagcggcgatgagtgtcgtcgtcggagatagatcggagagtactctgatgcggagtgactataaagctcctccgagtcaagctattcccaaagctcgattacaagtttggttctttagagtttgttcttgcattttggtttggacttgtttgattcagctcttttggcattcccaaatcttcactggtttaaccaatcacatttctagattctctctcccggttcagtcagttccattacctcctcctcttcctccaagttagttttgttgttttcttcattgggttttgttttggttattgagaatttgagagattgaaggaaagtttgaatttttttttttgcagggaattacacaagtaatggaattttactagtgtcctgtaatggcggtttgaatcaaatgcgtgcagcggttcgtgtaactctctctcatttgctgaatttagggttttgcaatatcttgatgcttgttttgtttcagatttgtgatatggtgactgttgctaggctattgaatttgactcttgttgttcctgagcttgataaaaaatcattctgggctgatacaaggtatatgtttgtgtctcatgtcaatgatcctacaagatttgtttgtagtttaaagcattcttttgtttcttccttttacagtgactttgaggacatttttgatataaagcatttcattgattcgttaagagatgaagttaggatcataaggagacttcctaaacggtatagtaagaagtatggattcaaattgttcgaaatgccgcctgtgagctggtccaacgacaaatattacttgcaacaggtttatttgcaagtttctttggtgttctgttttgcctctatgtgatgaatctgaaatgcttatgattgatcggatttttttgtttgtttcaggtattgccgcggtttagtaaacgtaaagttatacatttcgttcggagtgatacgcgattggcgaacaatggtctttctcttgaccttcaaaggctgagatgccgagtgaatttccaaggactgagattcactccacggattgaggctttgggatcaaagttagttcggattcttcaacaaagagggtcttttgtggctttgcatttgagatatgagatggacatgttggctttctctggttgcactcatggttgtaccgatgaagaagctgaagaactcaaaaagatgaggtgaaactattattttagctggatgctctcatcttttataaaattttgatttcatggttcacttctgtgttctaggtatgcatatccatggtggagagagaaagagatagtttcagaagaaaggagagtgcaaggactgtgtcctttgacaccggaggaggcggttttggttcttaaagcattggggtttcaaaaggatacacagatatacattgcagctggtgagatttttggtggtgcaaagagattagcccttctaaaggaatcatttccacgaattgtaagttttatcactttcaacattacgcactttggaaacgatttggtgatgatggtgacttgttggtttttcaggtgaaaaaggaaatgctattagatccaacagaattgcaacagtttcagaaccattcatctcaaatggcagctctagatttcatagtatctgtagccagcaacacttttattcctacctattatggaaacatggcaaaagttgtcgaaggtcatcggaggtattatgaaaatctgattcaagctaattcccagcaagattcttgaaatgaacatctttttgcaggtaccttgggtttaagaaaacaatcttgctagaccggaagagacttgtggagcttttagacttgcataacaacaaaacgctctcttgggatcagtttgcagtagctgtcaaggatgcccatcaaggacgacgaatgggagaaccaacacatcggaaagttatctccgttagaccgaaggaagaagattacttctatgccaatcctcaagaatgtatcagttaaaatgatatagatcactaaccactagagcaggatttgattagttcttgtttctttctttgtttatagacctttttcagtttctgtaaagtaagatgaagctaaaaagattgtgtcatcgttgtaccaagaattggtatgataataaaatcaggtttagttacattatcacatggttttcaagaagatgatttgctagctaaccaaaccgggaaacttgtatctatcaactggcctgagattttaagaaacttgcggctactagttggtgtactccgaggcactgagatactcgccatgctcctcaaagtattcgatcatacgtttgagaaacgcatcactgctcactgtctctgtatcgcagacgatacaacactgtcttctagagcgagtaacagccacattcattcgtctttggtcctttaagaatccaacttctttcttcgagtttgatcggaccatggaaatgatgatagcttctttttctcgaccttggaaaccatccactgtagagatctccatgtcctttagcttttcctctttgcccctcagaatcctaagcagcataacctgagcagcgtaaggcgtaataattccaatatcagaaggttgaactccactctccattagtcttttggcatgtgccattgcaacctctgcttcaccttcattataggtgctctcttcctcatctttcttctcttccatgtcacacccagcggtatccactaagagtagagtcgcctctgttgaagaagattttgttacattctccaagtcaaaaagcatgtgtgaggcaacacttgaatgcgctgttatcttgttgtcgtaaagctctttggatgaccagttcattataagctcatgcatacgatactggacagtaagcatggacttgatctcatctccataaagatccgctagtcgttcaaagagtgttctccctaatcctttcctttcagcttcagcactttggattgtaggtgggagttggagatggtctcctgcaagtatacatcttgaaccctttagcaaagctatccaacatgctacctcaagagcctgtgctccttcatcaatgatcaccaagtcaaaagttctattatcgagctttcgtgttaatgcaccagtcaaagttgtgagaattacatcagcattcttgatcacgtctgatacagctaattgctgccttttacgctcttccttgcccagagttcgaagctccttctggattagtctccttgtgtttttatctttcgctttcaacaacttcccgtttaaggccttcatttcctttctaatatcattcgctagaccgctgttatctccctttaggacctgagcatctagagcactatccagcacttgaggtaaaagccgtgcaggatgtcccaccctcaccagcttaactttatgtggaacaagtctctcaacaatattatcaactgcaatattcgaagctgcacaagcaagaatctttgaaccacgtttaacttcttgcaagactatttccaccaccgttgttgtcttcccagtaccaggaggaccatgtagcaaaaacacatcctttgaggataaagcctttgtaatcgcatctttctgcgattgatcaaggttcttgttaaaaggcgtaaaggacttaacatccttcttagacactgatggttgtctctcaccaaacaagacaggcactaaatcagaagcaggtcctcttaacacacctttactcagctgtatcaacgtatctttcatcctacgatacgtcacctcattcgcaagtttctccaacctaagagacgtgtttaacccttcttcaggtacctcatcaaacacaacagtaatcgaagaatcctttaaccggtaaacaactccttgcgcaagaggagacgaaccaagatcagatttgttgagtttcaaaacaacaacatcatggttaccaaacttgtgagcaggaagcacatctcctttgttggattgaaactcaataagagatttacccattagacctgtttgaacatcaacacatttcaaattgagaatcgttgtgcctttcttctgagcagtttcaatgttccttgaagcaccggaggttaaagacattgagatctcagcttctttctccatgtctataagtggagccattgttgacacaaaagcttcaagagacatcttcctcgccatttgcaagcgttaatttctctgaaagtgaaaatacatgatttcaattgtaatgagtttagtacacatttgagcgatactatacaaaacaacaactattgagattctaaattacgaaaccgaagcgaaactcagaggaatccgaattgatattaatctagccggagagataaatgatgtcgtaatgattctacttaccagaagaaggatttgttcttctcggttgagattgaaagatgaagaacaaaaccctagaaatcaccgacgaggaagacgaagtgagaaatggttgtggaaattggaagatgaagaagaactcaagaagatggtaacgagcacacgcatttgtctctcaaactcttctcaagcgttacgttataatgggcttagattttatcatataattgggctttaacgtttcgtttaggcccattttaaatgttttttttcttcatatatgtccctattttaaatgttttttttcttcatatatgtcagttttggatcagttttggtgtccatttaatttcagcaaaataaacttgtgcaagacatttcttttaccaaaataaaagttggaattttatatcattttaatttttgacagagattactagaaactgattaaagtacgctacagaaaaataaaaacaacattgctactcaaaatattttgaatcaattttgagcgaatatggctaagttgcgataagaaacactgattccgaaatcacaaagcccgagaatttgcgtggttaccacaatattgaagcactacaatcatcatcgttgttgccacgagcatatctattcgaaatcagtcctcaacacctcgtcatagaaaccatatcatataagacgtggtcatcgtttttgcatgttgccaagacatgcaaacttgtttcctttttccgaacaagaaaacatattatataaaacgtacaaaaattaatttgatcgtatataagttttttgcgggttgtacattatatatttatatttactcataattagtagaaaagagtacatttggttgccaacgaaaacatacttttttctcttttctactaataataatgaaagtacaacttttctctgcttgacttgtccacaatggccaatgggtagtgttgtactaaataatattgtgaagactttgttagaatgataaacggcataatgtatagagatggattcaaaactcgaatatttcaattgttttctattgaaagtgtagactagcctttgcaatatataatatacacatctacaaagactgcaggttacagcgacacataacattgattaatgacttggtaaacgtactaacatctaattcaaattgagacattttaacaatcatgtggttttaatattaaaatggatactaagaaaagatatatagattgaaacttcgattaatatatcattgatcatttctttccacattatcggtaatatctctctactcatatgctctattgatattgcatcattcgagcgacaaatttacaagtggctcaatttcttgtgaaataatgttttatactaatatttaatgtacaaaataagataacctttcacaaaaataacgaccatgtcgtattgtccagctaacaatttatttttaaactaaattcctatacgattaattggtcataagtcattacacttgcttctgtttctgtatatataaacttcctttttgtatttctttcggacacaacaaagaaagaggaagatgaagtttggtaaagaattgtcgtcacaaatggtacaagagtggcaacaagcttacgtaaactacgattatctcaaaacccttctcaaagaaatcatcaaactcaaagaaaaaaccaaccctcctccacctccacatcatgccgtccccggtgaaggaattagtcggaaaatgactctataccgagcatttagcggtcttgtccaaacgccgggaaagaaaagacaaagctctcgtcaatccaactattcttcggaaatagacatagaagaaggtaatctcaagtttcatatagttttttaacttaatactaaaatggtaatgagtgcattagtccatgtttttaatgtatttatgtaagtttgtttgcatttcctatgtgggattcctaataggtaaagctccaatacttgttagcaaatcgactcatggattagagacaacatttctaatgacggcagaggaaggaggagagtatgaattggtatttttccggcgactcgacgatgagtttaatagagttgaaaaattctataaagagaaagttgaagaagtaatgaaggatgcaattatgcttaataagcaaatggatgctcttattgcgtttagggttaaggtggagaatcctgttgggtggggatgggaggaacggacggtggagatgactcgtttggcctccgatatcgcgacttcgactgcggctatcgctgcttctacacccgccagaacccgaaccagtaagacaattaaagcagttaattctgtattttaacatacataactaaaacagttgcaacttgagattctccctaacactacatatttacaatttgaatagatcaaacttgactttaatttatgtgacaacaattagtctccgtcaatttatgaccgtttctaatgtttctttttaaatattttttcttcaaaaatcagtttttaaatcacatttaaattactaaccataaatattctctatggatgttcaagaaaacgatgtgttaagcagcgtctaaaatgtctaatttgatttaagcgattttagacgatttaagcgtttttaacataaatcttataaatataagatcatacataaaaatatctattagagaaataaaaatattaagtcttaaacaaaaattagatcaaagatttatttagtttataccaaccaatagaaactaaatagagctatgtgtatggacataaaacttagttcgaaactgaaaaaattatattaaaacgaaattttaagcgagtttaagatgtcaagacgattgtttaggtgtcgtttgagtgtttagcatttagtcggggtctatacagttgtttttttttttgtaatttggttttaattagagttcaaaagagtcattcttgtagaatattgtttacataagtgatgtgatacggttcggaacgtattttccgtgccgaattattcgcttttatatttgcgcaatgaaaattaaagatgaagaaaaatttgtgaactcatttttcacaatcgtagacggcttttaagtataaacttctttttcagtaaaaatgatatactaaaaagaaaaaattgatctcactaaaaaattccggtttataaaagctatcatcgtaaccggatcgccaatttgaaattgatgaatttatatatctcccgcgcgtttggttacagtgaatcctcgagctcaagctcacatggaggcaattcaagaaggaagctt

SEQ ID NO: 160 - DNA, 87543 bp, Arabidopsis thaliana
gaattcccatgcttttttttatcattaatttctcgtaatgcaaatgtaaaagcggataacttagcgcgaaaagttcgcactgaaccgtttcatataacttatgtaaacaacattcctcagttttggctcgtttgagtcctaattataatcggatgacaaaaaaaaaaaaaacaagggatttttaagtagattttagaatcactagttcaataacattagattttatgaggcttttaaaaatctatgattgaatagcatatgatttgttattttaacacaaatcacttgaaatgtttgattgaatacaaccccttagagagttttctataatcttgttgattattttttcacaatcttttaaagttttcaaacaatctctatattttgatgatatttttcataactttattttgtaaagaaaaatgtagaaagtcataaactaataacacaataatttaactcattaaaaatcatagattattttgttttaattgaataacacaaaacttttaatgactttattaaagtataaattcaataactctagatttataaagattttaaattagtttttataaatcttaaactaataataccaaactttaacaaactttttaaaaatcttgattgaataacaacagattctccataacatattaactcattaatactctatttaaatcacaaatcaataacacctcctaaatcagtagcagattttctaagaaccttaataaaaaccaaaccctagatccatagagtgctcggcaattaaacgtatactcatgggtatgacaaccgattcgatgaagaaagaggagacacaaaaaatgtctgagaatcatgattggtccaagctttgtcctgatattttgagaaagatcatcgaaagcttgagctctctagatttttaccgagcaaaaattgtttgctcagattggtactccgtttggaaaacatgcgtaaagcggcctctgcgtccatggcggatcatatatagagcaaagtattatattagtacttcattgatgttgttcgatcccgacgaagacaagatttataagaatcttgtcggagtttctgacgagagctatcgtttggctagctctggaaactggctcttgatggcagattctcgtcttgatttctatattgttaacctgttaacgggcaaaaggatcaatcttccaccaatggagtctaaaattcgtggtgcacaagcgagatttgtgcaaagcaaatatttttacaagtcgaggtacatttgctttgacaattgtaattctattcgtataagtgagaaagaagtattcgaatccaaaagagcagctgttctgtggatagacgagaggacgggagattatttcgttgcttggatttttaataagcattatttgttcacacacaagaaaggagatgattcgtggtgttggaataggaagtggactaaacctggttatttggatttggcttataagaacaacaagctttatatctataataccgataactacatcaagatttttgatttctctggagattaccctaaagaagatatcgaaaataacccgtatcataatcgtcctcttcagtacattcggggaccaggggaagtccttttgagcaagagaatagcgattcagaaatcgggagaggttttgatcatcttgagagttataaaaggttataactttttgttttggatctttaaaatgaattttgagcgtagaaaatgggaaagagtagattctattggagatgatgagatgattatcttcggtcatgggcttacagtaagagcaccggttcaagatattggtgatggagtcaagagtggttcaatctgtttcgttgaatatgaccgtcagccattttccggtgtcttcgatcttgccactggtaaagttacaaggccaaataaatttcgttatcatatgagttatagtcattggtttcttccaggatttgcttagtcttttgtttgactagctctcttctcttgttattaaattcaattataaattcaataacaggtctaaacccaaatactaatactgtatgttgttacacaatcgctagtttgaatcatacattgatatttatttctgacgaatcttaagttagataatgcaacgttacacaaccttctatatacacgatattcatacagagatgttccaagtcatccaaaccacacccatttattacccgtgatgtcgatggtcacagaatcggtgtatgcaatcttgatgtcctctcggacgcaaactccaagtatccagacgccttgagcagcaagtcaacagcatctatcctgcaacctgtgtgagagtggcagagtaactagctaggtttgtaaatatagcagaatatgaagtgaataaaagtgtgaagattgaagagagaattatgagagactgcttacaatcaaacaagctccttggttcttaggttgagaaaccaaacgaaatagaagacagtggaagattgaggttcacaatgatgccgtccgagaaatcatgatgaagcttctggaatactggagatctatctgattaggtccagaggttttcagaaaagatcctaaaggcgtgctcgttgtagacataattgccttggagaccacgtttgcttctgaagaagagagcaagtttttgatattcgaaatattaaaggataatctcaagatttccttaagctgcgatgtccttttcggcatctatggcttgacgaaagctatggaagtgattaatccgaccacgttaacgttccaagaactagtcctagcgaaaagtcaccgactatatgcagctgctccgttcatatcatttaattgtatactagtacttgtttacttggcaagaggaagaaatacaaaagaaacaaaacaaacatgacaatatgacataaggcgtaagtaattaatataaagcccaattccagcccattcaagcccaaccatagtatctatatttctttggttataaaacgaaaaacgaaaccctagatcaatagagagtgatcggcaggttatcatcatggattcgccgaccgattcaacgagagaagagatgggacgaaaattgtatgaaaatcaagattggtccaaactctgtcccgatcttctgcgatcgatcctcgaaagattgagttttattgatttttgcagagcaaaaacggtttgctcagattggtataccgttgggaaaacatgcttaaagacgatataaatttaattattcatttgttaccaattttgttaagaagcactggtggatgataaaatatatttttaaaatagtgatgggtctaaaaggttaaaatagttgtttaacttaatagcaattttagaaaagtatttttttttaagattaataagattaagctatcatattattagatgaattttaatataatattttttttacggcatgcaatatattgatttagttccagtggtgagataataacaacactttcacaaactattataatataatatgcatttttatttttaatattgcattagatgtactcaaaccaaacttaccaaattagtttcttatttgccttgtgtttttcggtcaaatatgtttttatattaaatttaaagtttaaacacaaacaaataacctaaactaattgttaaacaatcttattattttttattttaaaatcaaattttaagaaaataaaaaatttggtatatacgaatttgccccattactttaggtatttacaaatttgccccagtactttaggtatactctaatttgccccagtacttttagttatttccgaatttaccccacaacttttggtatttacgaatttgccccatgactttcggcatttaccaatttaccccagaactttaggtatatacgaatttgccccataactttcggtatttacgaatttgccccacatctttcggaatttacgaatttgccccatatctttcagtatttacgaattttccccacaactttcggaatttacgaatttggcccatagctttcagtattaacgaatttgccccacaactttcggaatttatgtatttgccccacagctttcggattttaccatttttccccatatctttcagtatttatgaatttgccccacatcttttggaacttacgaatttgccccacaactttctgtatttacgaatttgccccacaactttctgtatttacgaatttgcccctcaacttttggtatttgcgaatttgccaaataactttgtatatttacgaatttgccccacaacttcggtatttacgtatttgccccacaactttctgtatttacgaatttgccccttaacttttggtatttacgaatttgccccacaactttcgttatttacgaatttcccccacaactttcgatatttacgtggttgccccacaactttcgtaatttacgaatttgccccatagctttcggtatttacgaatttaccccataactttcggtatttacgaatttgccccaaaactttctgtatttacgcgtttgccccacaactttcgttatttacgatgccccgtaacttttggtatttacgaatttgcgccgtaactttggcaattttccgtttcctcacagtctagctttaggtgtttagttatcatataaattgatgaattttaatataatatatattcttaactaatttattgactacaataaataatatttataaaatgacttacgtgtttgtaaatattatttgtaaaatggtttatatataaagaaaatattttttattgactacaatatttataaaatggcttatgtgtttgttattattagttcttttgatttacaatcaatatcatgaaaataaataaataaaattaaatatctttaaaattatttatataataaattgaggttttaaaatgtaacagcttataatattttggactctactttttcattatttgaagtaaaaaatgctaaataatcaaacagaaaagtttggaaattttatttcatgacttatttgtttggagttttagaaataacaattgttatataacttaaattacttatataaaaattaaaggtttcagtctataaaagcttatataatagactaatagttaacttaagacatataagcttaaaaaattaaagtcatactatatttatactaaataattaaaataaaacaaaattggaattttatttcatggcttattataatgaaaataataatttatattttcaattagcccatattgaaaactcttgtgtaatgaattcatggaatatctaataaaaaaagaaatttaacaatattcttaaattgttgaagcaaataaccataataaaaaaaattaatttgtataatttaaatgtattattatacaaaaatatattgcgcattaattgttttaacatcataacttttaagggtaaatcctgtaaaaaaaaccttcaaggtgacaaaaaatttctttgctcttaatttgttttacaatatatacaaatcaaatttaaggaaacaactcaataatatgatattttaactttaaactcttaattttactatacattatatgataaaacatcaatttctttttgttgttttaagttcttaaagagaataatttatttacatttacaagtattgttgatcatttaaaaattgggtactaacatgatgtctttcgactttcaagacaatttacatgcatttcaatttttgcaaaaaaaaaaaaatgaatattttaaattttttttttaatagtaaaacataccatattcacaaaaaacaaaacaattagtgcattcaaaaattttaattaactaaattgtctttttaaaacacatcattatttgtaaacatcaaaataaatatttttaattatttgaaggacagataaacaattatagataaatttatatataatctgacgtttttcattacatttaaccgatttttatatgatttcttttttcttttgaaccgacattctgtgagatctttagtcaagttggaggggttttcattaaaagtcatcttaaatcataggctttcaattttcaaaaatttccaataagatgtagaattaaattatatttattaaagtaaaatagatattgaaattgtattgtaaaatcgaatttgtaagtttgaaatttggtttaaagaaatactaaattaaatattgaaaagtatgtgaattattatttaaacttcaaatatcatcaataagtttagtttatagatagttcagattactcatgtgtatagagactgactagttcagattactgattatagaagatatatatttgttatttatatcaaaatagtaaaattattaaggtataatcagtatgggtaataattataagagaatattacactatgggacacttttacaaaaatatttgtcgtttatgcactttcaaaagagaaggcactttggcttgttaaatggtccaatttgcccttaatcttattttctctttctctttagcaatatttattttgttcttcaccatctcttacttctcttcttcctctctctctttttccagaatcaaaatcaaatattagaggacaacctcaatattcaaaattcaaatttaaatcttataggctttatcatcatcttccatatctctcaacaatctaacagtgacaataaactacactatctttgattaccaaactccactacgcctcctcagtaacttccagcgccacctcctccttagccacatccctcacggccaccaccaccctatccttttccaccacaacctccaccagatctgtaacctctgctatgtctctcgtaaccaccacctcctccgtattcattaccgcctctcttgcgatatccgccaccacctccgtcacaggctcctccaccgccttgagcaaatgtgtggctctggtaatttgatttttgttttgtaatttcaatctcaagtcaaagaataaattatcttaattggagagtacgagcccttggtttctttcagattgtgatttattttgcaatttaaatctaagttttgacataaatttgagatccaattctctaagaaacttcttcttcttcaacaatggcggattgatttgatttttgctctctctcatgggtaaaactcgtttcacctacgtagcatcgagatttctgttaatcaaatctcctgttattatggacatagattagtaaaaaggtttccgaatggatatatttaaatggacataatatggataccaaaaaattgtttgttgatttttctttcagtttgcagagacctccaccttcaagaccttacgaacatgaaactttggtttttttacaaaccacggttaatcaaatctcctgttattatggacatggtatatatagaatagatatgcatcagtagaaatgtttccgaatggatatatataaatggactcgttattatagacaccaaaaaattgtttgttaatttttctttcagtttgtagatacctccacctccaagaccttgtggacatagaactttggtttctttacaaaccacggttaatcgaatctcttgttattatggacatggtatatagaatgaatatggatcagtagaaaggttttcgaatggatatatttaaaaggactcgttattatggataccaaaaaattatttgttgtttttcttacgggttgcagagaccgctacctccaagaccttatggatatagaacttttaccaaatttctgagataatcgagatcgaatttttgaagaagcttcttccatttgtttgcagaattggtactaccgatatctggtgagccgccgccataatcgataagaggaatcatggaaggggggagagagagagaaagagagagagagagagggctagagagatttcctttatttctaattacgtttaattgaattgagggttagtataaaaagtgtcaattccctagaaagtgcctcaaacagaataatattctctaaaagtacgtaaacgggtcacattccctaattataaataaatatgtaaacgttacatgtagtgagttaggccattaacatgcaatttaataaatgagtcaattatatgtttgtttgaaacttcaattatacattatgaggtttaatttgaggtttcattccaattttcttcctcctatagctctcatatgtctctctctcttctttttttcctatttttttgtggtcattagaatcttttatttttcattcaattatacatttgtattgacaaaggcaattgaatctgttttatgtaattatcttttttttttaaaatctgtattatttaatcttgggtaaatgagacatcataagtaaaaatagtgtaataaaaatcacattatgtaaattatttattttataataatgaaaataggaaataattgtaggggaagcacatgttttaaattaatttaatgttaatttttattttaaaccatcatttgtatagtatttttgtaacaatttttatataagataagttgagttattttttttagtcaaacattatgggagttaaacattttaaagaataaatatgcaataaattatgattatgattattattaaagagaaataaatatcatattttcaacaaacaaatattataatctattcatatattttaaagaaaaattatttgatctttggcttgaaagttataaaactaacattttattctttaattcctaaaaaattattttgttgagaaattataatgttattgtaattatatgaaatattgaaaattgatacattattagaaaaattaatattattatataaagtacggttttgaaagttagtaactcacgagattacgacacgtgatacgtctaacgagaaaatgtttacatgtgttattaaacatttaaaatttttattctcttaaaatagaaaatctaaaaaaagtaaacaaatttacgtatactaatttttatgtctatatatatataattatttttattgatcacaaagaaaattaacaaatttgattttagatgtgttgttggtcaattaaataaatctataatgtattaatgttttaaaaaaatcattagtatgaataataactaattaaaaagacctctgaactttaaaataacaaaataatttatttaacattaatttaattggataaaattgtatttttcaatgtaatgtagtattttatttgaatactcaatgagaatatttttatggttatacttattttttagtctaagaattttaatgcatgtggccattagtgaaaacaccaaaaattaggaaaatagggcttagagggattgattttttgattatttgatgaaaatgttaatataaaattttaatgttttatttataaatttgaagtcattttatatgagtttgacattaggtaaaactaatttatgagattatagaatatagcaaaactatatcttaaacaatatttattttccaaaacatttttttttttttggttaattatcttttggtatttgttaattattgtaatatgaagtaattatattgatttgatacgatatatgtattattttgatataaaatttaacacttatccattaaaataacgtgtgcataatcaaaatcaggattattatgatgaaatagatagttaaattgtatagtaaaatagaatgtgcaatattaaaattttggtttttagaaaattactaaataaaatatagaaaaagtgtgttgactactatttaaaatttaaatatcattaataagatatagctaaattcattaagtgtatagtaaaatgaaaattgtaagattaaaattcgatttaaaacaactttactaaattaaatatatttttttaaaaagacctgacaaagaaaagaattagaagcgtctctcatagatccaccaatttattgactcttgctaggtagcccgatgtctcatcgtaagatattggtgagtcttagaccaattgggaccaaacgatcatttactatttagaatttaaatatcatcgataaaaatttataattattttttaaacccgcctagataggcgggcctaacgtagataaactattgttttcaaaaattaaaatactatattacattgaaaaatacaaaaagtactatataaagtagggtttcgaaacttagtaactcacgagatcatgacacgtggcaagtctaatgataagatgtttacatgtgtcattaaagatttaccttctttattctcttaaaacaatagaaaacctaaaaaaaagtaaataaatttacatatactaatttttatgtctatatacatataaaattaacaaatttgattttacatgtgttattggtcaattaaataaatctcgcatgtattaatttaaaaaaaaatcattagtatggataataactaattaaaaagaccactgaagtttaaaataacaaaataatttatttaacattaatttaatttgttaaaattgttaaatagtaccaatttgaaaaataaattatttatacccatttgaaaaatcttattatataaagtacggttttgaaagttactcattcacgagctcatgacacgtgtcaggtctatcattgagatgttgatatatgtcaaaaaagtttcttttaaaaatactaatttatatttctatatctaaaaatttaacttataattttcttaattaaaaaggaaaactaacaataagatggagtgtatataattaaattgtatttgtattgcaaaattggattgtatttgaattatatacaatcgaattaaattgtattgtattatgataaaaagatatttaaattgtattgtaaaatcgaatttgtaagattgaaatttagtttaaagaaatattaaattaaatactgaaaaatatgagttactatttaaaattcaaatatcatcaataagttggagagtatagaattaaaaggcagtttaatatgatgaaagagatagttaaattacttaattaaatattagaaaaagtaggtggatcactatttactattcaaatttttaatattatcgataaatatttgaataaatttatatctaacactcgcctatttaggcgagatttatctagtttcattataaagtatggttttcaaagttagtaactcatgagatcatgcaatgtgtcaaatctaacaatctcagattttaccatgtgccaaataacattttccttttatttagcaaaacattttaaaatatgtaaatttattattaaaaagtaaagaatcttaatatataaagtatgattttcaaatttagtaacttacgagatgtgccacgtgtcaaatctaacgatctcagattatccatgtgccaaataacatttttcttttatttagcaaaacattttaaaatatgtaaatttattattaaaaagtaaagaatcttaatatataaagtatgattttcaaatttagtaacttacgagatgtgccacgtgtcaaatctaacgatctcggattttaccacgtgccaaacaaaattttccttttatatagttagaaaattttaaaatagtaaatttatttttaaaaagtaaagaagataaatataaaaaaaactagggcaattgacaaaaatagcaccaaaagaagtttttcttccaaaattagcacaacatttttaaaagtttacaaatagtactataaattcaattaaacttaactaaataataaaagaaaaataataaaaatgagagcaaacactaatctaatattaaattgaatcaaaagtttttaaaaataatggaaatatataccctaaattggaaatagagaacccaaatataataccacaaactaatactaaaatgaaaattctcttttaaatggtgaaaatatataccctaaagtagaaatagggaacccaaatataatattttcaatttatttttaattatttaggttgaatatattttatataaaaattgtggtattattgaaaaaataaagggagattgacacaaatggcacaaaaaaactttattattccaaaaatgacactttcttttgaaacttccaaaaaaagcatataaaagtttttaattctctataaattaattaaataataaagtttttttactaccatttgtatcaattccccccccccccccaaataaaaatgagagcaaacactgatattaaattgaatcaaaaaacttttaaatagtgaaaatatataccctaaattggaaataaaaaacccaaatataatactacaaactaatttaaaatgaaaaatctctttaaaatgattgaaaatataaaccctaaattgaaaataggaaacccatatataataccataaactaatattaaaatgaatcaaaatttcttttaaatagttggaaatatataccctaaattagaaatagagaacccaaatataatattttaaatttatttctaatttattttggttgaatatatttttatataaaattgtggtattattattgtccataaaacttgtttttgtgttacttttaagaatttctcaaataattatttgagtgctatttatgtctaaaaaactttttaatgctatttttttcaaaaaacttaaaagtgtgctatttgtgggaatttctcaaaaagtaaattagtgataatatttttagaacaaaaactttagagtaagtcaattagtgctatttttggaagtttatggagtgtgtgctattattgtccataaaacttgttttagtgctattttgaagaatttcccaaaaaactatgtctcttataattaaataataaaaaagattcaaaagtaaagaagataaatttataaacaaatgtgtaatcaaaacaaggattttgcaaaatggaaagatatgacacaacaattagacaatacatatactgaatttcaaatttcaaatttcaaatttcaataagttgtttaatgtttataaatttatatattaaacaaatatttttgataaatctgatgttcgtattcatgatacatctatcataaaataaatattttctttagttaaaattagcaaaacaaaacaaggattttgcaaaattgtaagatatgacacaacagttataggtacatatactgaatttcaaatttcaaattttaagtaagtatagatttatttaaatttaatgttgttttgtcataccgatgtaattggctatataatattttttgagaaatctgatgttcgtattcatgatacacctatcctaaaataaatattttctttagttaaaattagcaaaatagaatgtgtaagattgaaatttgttttttcttttaaatattatattaaatataaaaagtgtgttaactacgatttagagctcatatatcataaattaaaattagcattttttttttctcacccgcctatttaggcgggccttatctagttaattataaaaagacaattgacaaaaatagcaccaaaaaagagtttttttccaaaattagcacaatatttctgagatttcacaaatagcacgataaagttcaattaaacttaactaaaatataagattgaaaataaaaatgagagcaaacactaatctaatattaaattgaataaaacaattgtagaaatatatatcctaaattagaaatagataacccaaatataataccacaaactaatattaaaatgaaaaatctcctttaaatggtgaaaatatataccctaaattagaaatagggaactcaaatataataccataaactaatattaaaatgaatcaatttgtttttaaatggttgaaatatataccctaaattgaaaatagagaatccaaatataatattttaatttatttctaatttattttggttgaatagattttatataaaaattatgatattattcaaaaaataaattagtgataatacttttagaaaaaaacttcataataagtcaagtagtgctatttttgaaagtttatggaatgtgtgctattattgtccataaaaccagttttaatgctatttttaggaatttctcattgtaaaaagagcattgcaaaaatattaagacaacaacaaaagtaagctctttagctgatatacgaccaccaactatctggctatcgagaagatctaatatgcagggaagttattcactagaataattcaatagatttgtttagtataaaactattattagattgagtaaatataaaaatagtatatttaaatttgagaggaatgacatatgtcaaatgaatcaaacaccacttgtcagttttttacggtatgagtttgagggaaccttacttatatgtaaatgtataaaaatagttaaacttaataggcgttcgttctaatccctaaaacaaaaccttagttactttagcgtatagggcaagtaggcgcagacatggatatgtcgatgagagaagagaaaagaccaaaagtgtttgataatcacggttggtccaaactttaatttgtcccgcgcgatctttgcaaaagaccatgaaaatattgatctttatttacctaaagatcatcaaggtggatgcgcgtaacgatttgatgagagaagaaaactgaccaaaagtatctcatcatcacgactggtccaagctttgtcttgaccttttgcgaaaaatcattgaaagcttgaactctattgactaccaccaagcaaaactcgtttgctcagattggtatttcgtttggaaaacatgcgtgaaacggcctctgtatccatggcggatcatatactacgatgatgattcttccagtttgtttgatcccggtgaagacaagatttacgggacaaaactcctcggactctctgacaatagctattatatggctagctccggaaactggctcttgatggtagattcttgataggtttataaggtcgactactagagaaagaagctgagaagattgggctaagcgaagctgagaagagaaaagaggaagtcaactactgtgttgactgagttgacttaacaaatgagggcaaatactctttccagttagaggccttgaaactcttcttctataaatactgactctgttcttatctggggattttatgctttttatgttgtgatatttctcgagagagaattggccttgtgatgtgccagaggaagagatcaatgttgatctcttggtcatcggttgcttatatctatgttgatctaaacataacgattcttatcttctctttgtagttacgtaatcgattctatcattacgatctagagtttctagagtttaaggatttgaaactttaacaagtctcgtcttgattcgaatcttattaaagatcaatcttccgtcaatggagtcgtcagttcgcggtggaaaaataagattcgagccaagcagatactataatagacaaggcaagtggggatggttcgtcctccatccttttggtaagtattgcgtgtccaaacacatgttgggaataacaagatcagttggtcttggatagatgagaggacagtggattatttaattgcttggactttacacaacagttatttgttcacatacaagaaaggagatgattcttggtggaactggaatgataagtatgggacatcagctccgatgtttggggatttagcttacaagaacagcaagctttatcagtatactttgcgccactacatcaagattattgattattgttacatacttttacttcacctttttgttttgaatttttttttttataatgattttaagacaagattgtgtcagccgttgacttatgatcaactaggaacctaatcggaacgcaactcgagattcattttatttattttatactacaaaattatcttgaaaaatatatcgaggaaggtgtcatatctcatggaatccgaatctgccaataatatgagagccactagcaattattctgaatctccccaaagggaagaatcaaaagttgttctctcttgttctgtctttgttctttgttagagttagaacagaagcttccaaaaggtaataataatctctttcaagaaactcattattagtcaaagatgtttactttttagtactctctctgttcttcattgcttctctagaaacccaatagattttgactcttgccttgcctttgcggttgtctaaagatcacaatcctcaatttgagtttgatcgatcattaatgtgtgtcgaagatcagataaccaaaagaatcttgtttggtgcagagtttttttcatgatttttataagtatataaaagagagatagaaagatgtatatgatagagagcaaaggaggagcaattgcatgtatgctcttggctcttctcttcttagggacatggccagcaatcatgactctaaccgaaagacgcggtcgacttcctcaacacacttatcttgactacacactcacaaatctgttagctgcagtgatcatagcgttgacactaggagaaataggtccgagcagaccaaatttctttacacagctctctcaagtcagtcacatcttcttacttctccttagacatcttgtcgaaaactattgtataaccgcggtttttttttttatcataggataattggcagtcagtgatgtttgcaatggctggaggaatagttcttagccttggaaacttagcaacacaatatgcttgggcttatgttggtttatcagttactgaagtcatcacagctagtatcactgttgttatcggtacactcttctttcttcaactactcttaactgattttttcctctgtttcttctctgttcttatgaccatttctgttttctagtacaggcacaactttgaactatttcttggatgatagaatcaacagagctgaggtccttttcccgggggtcgcttgtttcttgatcgctgtttgtttcggttccgctgttcataaatccaatgctgctgataacaaaaccaaactccaaaatttcaaaaggtttgaaaaagattcatatctattgttgtttccgtttggtttggtttggtactaatcttgatcttgtttcagtttagagactacttcttccttcgaaatggaaacaatttctgcaagcaacgggttaacaaaagggaaagcgaaagaagggactgcagcttttctcatagagcttgagaagcaaagagctataaaggttgaaacatactactcttcctttaccctaacagatataactgatatgtatatatgttctctgaagattcatgattggcattgaggacaggtctttggcaaaagcacaataatcggattggtgataactttctttgccggtatctgcttttctctgttctcacctgcattcaacttagcaacaaacgatcaatggcacacattaaaacatggagttccaaaactaaatgtgtacactgccttcttctacttctccatctctgcatttgtagttgctctgatacttaacatcagatttctctattggcctatacttggtctcccaagatcttctttcaaggcttatttgaatgactggaacggtcgaggctggtctttcttggctggatttctatgtggatttggcaatggtcttcagttcatgggtggtcaagccgcaggctatgcagctgcagacgctgttcaggtttagacaataaacaaatcctctgttccatgatttaagagtgaaatatgttttacttattatgatttgaatatgtttcaggcacttccacttgtgagtacattttgggggatattgttgtttggagaatatagaagatcatcaagaaaaacatatacacttctcatcagtatgcttcttatgttcatagtcgctgtcgcggttcttatggcttcctcgggacatagaaaatgaaattcactgaaacttcttcaagttaaactgctaaaaggatccattgaaggaagagttacttcaccaatggctgcaacatgttcaagtctttgtttatatttaaccaaagtgttttctttgttggtttctgtcttagggctttgctaacaacaattggttgtattgtctttgtttacacatcagagaaagaaaactatagtttatggcaacttgagatttatttattttatagaaaatgggaaactaacttcttcctgaatctggatctgccaatcaaatgagagactaagttttttttcttctgtatctgttgttctctggtcttcctcaaagtcaaagttaagacaaaagctttaataaggtaatctctttcaagaaacctagtcaatagggaaatttaatggaatataaggtttgagttttatagagatcttcttgtatcagcatgtgtcttgtgttaatgttctaaagaacctttcttaagacaactagcttcatttttatcacgagagatcaatgatatgataacagaagaatctcacttctttactttgatgcagtgggatttggtgattttataaaatgtatgtgatagagagcaaaggaggaacaatcacttgtatgctcttggctctgctcttcttagggacatggccagcaatcatgactctaaccgaaagacgcggtagacttcctcaacatacttatcttgactacacactgacaaacctgttagctgcagttatcatagcgtttacactaggcgaaataagtccaagcagaccaaatttcaccacacagctttctcaagtcagttacacatacattcatacacatatttgttgttggtttttgaaatgcaaagtttttttgtcacaggataattggccgtctgtgatgtttgcaatggctggaggaatatttcttagccttgggaccttagcaacacaatatgcttgggcttttgttgggttatctgtcactgaagtcatcacagctagtatcgccgttgttatcggtaaactcttctcttcaactactcttaactgatttttttcctctgttcttattaactcttttgttttcaacaacaggcacaactttgaactatttcttggatgatagaatcaacagagctgaggtccttttcccgggggtcgcttgtttcttgatcgctgtttgtttcggttctgctgttcataaatcaaatgcagctgataacaaatccaaactccaaggattcaaaaggttaaaaaaagattcactatactaggtctttgttttgttttcttttggtttggtttttaacctaatctgatcttgtttcagtttagagactacttcttccttccaaatggaaacaagttctataaaagaaggaaaagcaaaagtagggactgcagattttcttattgaggttgagaaacaaagagccataaaggttaataataatacacacagcattttcctaaacagaaataactgatattcactgatactcaagatttgcgttgacaggtttttgggaaaagcacaataattggactggcgataacattctttgccggtatctgtttctctctaatctcacctgcagtaagcttagcgacaaacgatcaatggcacactttgaaacatggagttggcacactttgaaacatggagttccaaaactcaatgtgtacacagccttcttctacttctccatctcttcatttggggttggtctgatactaaacatcatatttctctattggcctatacttggtctcccaagatcatctttcaaggcttacctaaatgactggaacggtcgaggctggtctttcttggctggatttctctgtggatttggtaatggtcttcagtttatgggcggtcaagccgctggttatgctgctgcaggagctgttcaggtttaagacctcttttctgttcaatgatttaaagattgaaaataaacattttgggggatactgctgtttggagaatacaaaagatcatcaagaaaaacatatacacttcttatcagtatgctatttatgttcatagctgcagtcgcggttctgatggcctcatcgggacatcgaaaatgactaaaaatgcattccacagaaacatctacagactaaaagcttcacaactttggtttataaacttgtaagatacggtactcttgtatgaaggtaaagtgagcaacatgttcaaatatatcattggttaaattttaatcgatgggttttgatgttatatcgtcagtataaatatatacgtctcgcattaattagggtttccgtggttcttaaccctaaatccaaacattaggtcaactagagtgtgaggcacgtaagcgcagacatggagacgccgaacgatttggtgaaagaagagaagagacaaggagcttctgaaaatcaagattggtccaagctttgtcctgatcttttgcgaccgatcctggaaagcttgagctctattgattttcatcgagcaaaaaccgtttgttcagattggtattccgtttggaaaacatgcgtgagtcagtctctgcgtccatggcaggtcacataccttaacgttgtttgatcacaaagaagacgaaagtttcaaaacaagagtcctccgtcgtcgcttgaacggaagatattgtatggctagctccgggaattgtctcctactggtagattctggtctcgatttctatattttgaacctgttaacgatcaaaacgatcaagattccatctattagacgaaagggctgtagggaacactctttaacgacgacaacgaagaatgcaaaacaacagctgttctgtggataaacgagagaacaaaggattatttcgttgcttggattaatttttcaaacagaaatacttgttctcactcaagaaaggatatgattcgaagtggaatcaaaacagtggaagtattttcgatatggcttataagaacagcaagctttatctgtatactttggatcatcacatcaagatttatgatttctctggagattctcccaaagaagaaggattgacaaacccgtattcgaatcatccatttcgcttcgatgagaaaccgcaggaatacatttggaagaggaaaatagtgattgcagaatcaggagaggttcttaaaatctgagcttaaaaaaacggaaacaaaaggagactaatgaagaggaacttttgttttacatctttaagatgaatcttgaaagtggcaaatgggagagagtgcattctattggagatgatgaatgagatgttgatctttggtcatggggttacaatgagagcacaagttcatgatgttggtgatggaatcaagagggattcaatctgtttcgttgaagatgatctttggccggattttgatcgtccttcaaattgcggtatcttcaatcttgccacaagtagaataacatggcctaagagatacggtgtttacatagatcaaaaacaatggtttcttccaggatttgcttagtctttgtttcactaatgcatgttcttccaaagtttaaggatgacggttcaattttcttctctgtcttattttttcactagtttgaatttgcttcgacatagaatgtgatggtgtcttctgtgttttgcttttctttctcttaaacttatttcttatcattaatcttaaacacatccagttgtttcactatagaggttaagcctaagctcagcaaaagacattagttgttcatctttacattagaagctactacatgcgtcttcttcttcttctctaacataagttttcagagagggaatactttcttgtgcttgaagtataacacaaaaccaaaatacaaaaaaccgcatccaatacctgttatcagtaaaacatactggaaagtcgtcggattctggaaaacagagtcttgcaaattcatcccgaagacagcggttacagcggcaaaaatagctgccacaaaggttgccgcggtgagaagcagttgaaactgaatcaactgattctgcacattcccctacaaaaacatggacaaagtcagagacccaaagagaaacaagaacatgattacgagacttgattttgtctgtccttaccagcttaatgttgatcagatcctctgtatcatctatatactctttcagctgcaaacacaagaacatgatcaaaatgatgaaacaacatgtagttgagtttaaaagaaagattaagaagaatctaaccgatgataatttgctcagagtgttatcaacaacgacaaagtaagcttctagtaacatctctagttgatcaatgttctctccgatgctagaggagcttaacaagcttttatgtgagccaacaatgctgctaaaggctctttgaagcttcccaaagtttccacttgttgagcccacaggtgaaaccggcgcagacttcgaaactattccagaagattcaaagtcctcaccaatgttatcttctagctcctctgacgcatgagcttcagctctttcttttttctcagtcaaatacatctcagccatgtcatcatcatcatccattaaatgctctatttcatcacaaacctgcaagttttgacctccaaaatcaaattatggtagtagggctttttcaaatttgaagagtcttttgtgttcaccttctgaactttctgtgttaaggtaagaagacgaccttttagcctgcgcacgtgttctagattaagggtgctgatgtttgtggctagttcatcaagaacgggatacacctccatctcaagctcattcacctaaaaatcacgttcaccaaaacttttgagcttaacaattagcttaaagtcatgcaataaatcatatagaagaatgatgaagagaatgtggcatacctgtgcatctaaagacaagcaagatagttccaaaaccagctccaacgctttaaattcaaatggcaaatcatctaaaaccaaacacatataacagtttcatcagcaatctaatctatatcataactccagaccaccaaagctataccaaaaccactgacctttaacatttaggttgtggtttgattgaaggcgtttacacagttccgactggtactgaacaacagatgcatctcgagcattcatgagaatgacctcttcagctgtgataatacacctgatcttctcaagactgacaactatcgctctctcacgccccaaaatactcgagggatagataaacaaagggtcaaggagtctcaaatccctggatggtaaggaacaacgcttcattatagtcgccttgtcgagctccaaaaccgcagagttcccatcttgatcaattttcacccaagaacgactagattgacctctcttcttaagaccagaaaaaggatgcccacggttagtttgtccttcgaaattaaccggtctaccaattttttgagaagatatgaaatccggaagattagaagcggaaaatggatctagttgttctcccatgtttgctcaatcctctcttccttacaatttactaatgcatcagaatcaaactctcaccattcaaatgaacagtttccagtgaaacagaaggagtccaagtaaacctttggccacagtttacaacctgaaaacaacaaaatttgacatgaaactcaaattcaatttcttcatatgatctctcttgaagaaccaacgaacctgagaaattcacagaacaaaagacaatacttttctaaatggtggaagctgcatcaaattatcaagaataacttcgtgtttaagttcttaagacactaaaacgaagaaaagtcacaaaatttgcagttaaagaagatccaattctcagattcagtatcttaattctaagaattcgatccgttaaaactatccaatacaaatcacaccgatcaattaggtctacagtatccatatccaattccaaatacatacccgaaaaaagcaaagaatcctaaaaaggaagaaactttcaaagaccatgttacagtaaagggaaatacaaaccctagattccataaaaacgttacctttcgtttacaagctttcactttccccaaacagtaaacagaagaggaagaagatgaacaatgatgcttttttttttgttctagtatctgaagccacgtgttaaaagtcaaggcgtttatctattggatagaacacggtttcttaaatagaccgtaacacagaggatcatttataaaacagaacagataagaagacatggcgcgaaatgcagccatggttttgttagttaaagttccgaactttacgagatacctttcgttctgtttatctccagacaacgaaccaaaccctagatccccttttcctcatcttaatttttttctttcttccttcattctctctagcaagaaaaagaaacgaaatttcacaacttcactcatcaggctctggtcaaatcgatttcaaggtatgttttttgatgttatatttgttcgaatagcccgagaaattgcttaaaatgatgcattgatgattgcttctccaggtgtttatggagtctaaacatgaagaacatgtgttatccaaacaaaaacatgatcaagatgtaaacaaaaaaggttcattagacgacgaaaatggagatgttgagcataaaacgatacctttacaagaaacagaaactgtaattattaactcagaatcacattcaagattatcgtcgtcttcgtcatcttcgtcttcttcttcttcgtatttatcgccaccgaaagatctacctgaagaggtactaaaagaatcattgaatgatccggagatttcttcaccacctgttcaagtaatggatagagataacaacggaaaatatgacccgaataggattccatcttcggttttcgagagaagcaaatcgaatgtgccagctgaatggagctgcacttcgaatgaatctctcttcagtattcatttaggaaacaatagtttcactggttatggtggtgatttgatgaaatcaggtgaactttataaatccggtgagttacttgcgtatagtcctggacttcctatgccgcctgtaccaggatcggaaccaaaacccgtagtcgaagaaccgaaagttgttgaatcagataaggaagagaaagttgtactagtagaagaaacacatacatcatcatcagatgaagaagaagggaaaagagaaagccatgagaaagaacaacatcctgctgtttcttggaaaactcctacaacttcttaccgttctaaccgaagctcaaacagcgcgcactccttctctttcccaatgtaaatacactccatccatgaccatggctgacaaacatttcctcccctcggttttaatgaaagtttcttgctttgcttttttggtttttacagtttggctggagctgcaagtgattcaagaaaggtagaaacggagaaacagaaggaacaagcaaatcagtcacaagagtcacaaaaaccagtagcagatgcaacaaatcagaagcagtcaatgtgtaggtgcttctcatgttttcctcaatgtccgtggtgttgttcttcttgttcttgattctgttttgatgtttgattagacaaaaacaaaagttgtggagtttatctcctgtaaagaaagtatgtaggtcattagaaccttaaatcaattcgattttgttctctgctttgttcatgagaagatacagagatcaaagagtgaagaaaaatgttctagatttatccccaaacaatatcacaaatcgaaaagatcaacacctaagatatccacggaaacaaaaatttgttttaacatcgcctacaacctcagattctcaaccatgagcaaagcttagaagaagaaaaaactaatctagtttttggcctcagtattgccatggccattgttctggtatgctttaccatccccattagactcactgttccgtctcccatagcctcgtcctccattgacgccactgcccctaggtttgtatccatcacgtctgaaaccatcctcatttttataaccactgttgtttcttgtagagactctgttgccattttgattgttacctcctgcataatccagaaaaagtaagattaggattttgtttttacatttaattaaagttacaatctttgagacaacaatgcctttcagaaacttgcctcgcttttcttctatagatgctcttcggtttccgattctgattggtgattccctgtgagcctagagttgtgcatttggagatcagataacaagaacttcaaattacattatagccgagagtttgatatgcaaacaaaaacatacctgaaagacattttttactgcttcaccattttcgaatgccacaaacccaatacagttctttttttcctgaaaattcacagatttttaagcgtgtgattgaaccagttataaggtttttcaaactttgcaaataatttttttgtagatcattgaaagaataactaaccgggtaacttctgacttggataccatcctttctaatagctccaaaacttttaaatgtttcataaagttgctcaatagtcgcatccataggcaagtttgcaacaaatatggaactaccctgagctgatacgtgaaaaacaaataatcaaatgagacaaaagcaagtagaagaattttcaaattcattgtttttaactattaaacaatgaataaccaaccttgtggtttaatgctttcagcagaagcctgtttacgaattggggaaggagctttgcgctccggagcagcaaccggtttttcgacaggtttacgcttgaccggcgaggctttaacctgtaaagtaccagcgctttgagccagagattgaacctgtaagtttgaaatcacaccaacagattagaggatattatacgataaaaactaagcacaaaggaggagacttacaattaatgcaaacgatttcttgggaacctcctcttgaagttttgcttcagcagctttaggtaagctactgttttcattcacaactttctcctcagggactttcgcatgtccgtttggtatggcacttgctggcttcgtcaccgtagttttagcttcagtagggacaataaccgcctctacactttcatttgcaggctctgctaatcaaaaccattaccacatgaatcaaaacaatgtcaaggtggtgaatattttcagattcttgaaaccattggtaaaacgacttaccagtgatagcatttgttgactgactctcctcaacctccttggtagcttctggttcaacaaactcatcagacacatacctaaaggtatcattcagcacaaagtagcttccattccgcgacacaagaaagaaactctgagaaaatttcctccttcctccatcgttcccgatcactaaacccgtgactagagttacaacaccattctttaaagttgattgagaatcagcagttagaatctcgatccttgagcttttgtagtcaatggacattatctgatcattaatcccctgcaaacacgatgaaacattcgtcgaatcaatactaacaacaataattcaatgagacatactatgaaagtggctaaaggaacttactttcaaggatttgatagtaactatctcaccatcgagaccaggccgtgaaatcatactatcctcgagatagaatttgtgtacttccgaggttgaatcataaaggtggttatagtattcttgaacaaacccattgcctacaaattgtggatctactgagggagcgtttgattcaggtgtcatctctgcaatttctctaagacagtctcaagcaaaatcgaatcaaacaaaaattcacaagagctccaatctgcataacttagaattgtactatgtggatctaactttatagtacgaaatctattagcttattgtaattgcaagtacacatagttggtttctccagatattatatatgtaaggtttgaactgaacttccatagatctataactagtcgagtttgagaaattgaaaggtataaactttgctccaatacaaagatggattgagagattggaaaataaggtatgaagtatgaagcagaagcaattacctgataaattggagaagacaggagaatcaatcgcaattagagtgaaggagagaaggaaggtgaagaaacgagtttacttgtggtgtttatatatggcttctagggttttttttacagacaaactccgaccagaattgggaatttggttttggcctctctttttttttgcttatgctttttttttgttttttttgcaactttttggatattttttcaataatattttgtcacgtaatcatatcctgtttacaatttagtgaggatttttatttgatttgattagttgttcttctaatttccaaatcctaattagtttttttttattattattattattggtttgggatttttgaatattgttcataaataataacaaatattattttggtttcggaaaaagaacaagatgattggatggatttggatttagttttggactaatatcatagaattttataggtctttgattttgattcgaacggttaatttggttttggttacttgatttttcggggtttttggaaaataaagcatttcctaaaacgaattgactaataattcgctttgttcagttcgaacatggtttattcaatttttttggtctgatcactaatcaaccaaacaacaagttaacaacaatgacgcataaattatgaatacaaaaacaactcggtagcaaaccttaatcatcatgattcatgatacaaaaaatacataagttgttctaaaagaacatgtcacttgacaaatgacaaagtaccaataatccattttgcctcagttcttataagtgtatttggtatgttgtcactattttgtagacgctaaaagagaaagagtttgttgtacaaaatatataaacagaaaatatatatggcttctaagatttttttataaagacaaactccgaccagaattgagaatttggttttggccttttttcttattcttttttttttgcaattttttggatatcttttcaataatattttgtcacgtaatcatattatgtacaccatgtttacaatttagtgaggattttaatttgatttgattaattctttttttatttccaaatcataattagtttttttcttctttttattgatttgggacttttgaatattgttcacaaacaataacaaataatttatcggtttcaaaaacgaaaaaaaatgattggatggatttggattaataacataaaattttataggcatgcaattttgatccgaaaaagttaattctgtttccgttacttgatttttgttttttttggaaaatgaactttttctaaaacgaaccgattaataattcgctttggttcagttcaaacatggtttattcagtttttttggtctgatcactaaacgaatgtaaaatcaaccaaacaaaaagacgcatcaattattaatacaacaacaacttagtagcgaaccttaatcatcgtgatatatacaaaagatacataagttgttccaaaaaacatgtaacttgacacaaatgacaaactaccaatgatccattctgcctaagttcttacaggtccatttggtatgttgtcattgttttgtcgatgccaaaagagaaagagttagttatacaaaataaataaagagaaaagacaagcctttaagccgcttaaaaatcttaatgcatttgtcaccttgtctgttgtgaaagaaaataaaaatatattactgattaaaagaaaaggctctcacaggtaaatgaatgacaaaaaaatatatcaaatatacctcaattttcaactccacgtcaatgagcaactaatgattgtgtatgagtactctcagaagctacacaaggcaaataaaatgtagttgagtctatagatataaaaataacaacaaaaaaaaactgaaagatagagagaaaatgagtacttaaagactcataaaactttaattcttcgaacatctgaatcaggtttgctaacttctcaactaatgatattcatgagccattgctgaatgcaaatcaatgattcaaccatgagtggtgacaagcaacttcagaaaggatccaaaatacgaccactagtgttgaatgcagactctaaattgagaaaggagacatgtatgacaagcacatctcttgttaattctgcaaagattgcaatttagaactattcctcctccaccatcttaagacatcataatccaatctcaaaccacttgtaattcttagcacatatttttcaagcaggtaaatgtcaagttccttactagattctatatttgtagtctctgctaccatcttagtgtacaaagagtccatcatctcataaccatcatcattagattataccaaatagaggatgtcacttatttaaatgttgaagaggaaagaatgcaattaaaaaagattttcagaaacttaactaacatttgcacttcatcccagctaactagcagaagatggaggaccaacatgtttgccatcattatcatcatcagcatcatcatcttcattcttttctataacttatcttcagccaacatcttatcaaatgcacctctaaacgtgattgcaactgtgagcataagataagtcgaattccacctagtaacaacatctagacataagttttatttacttacatttcatgcctcaaccctagatttaaagatttgagtctttcactcgatgacctcacatacttgattgcattttggatagccattatattatgattagctttacatatcccatctttgactatcaggtttaaaatatgagcgcaccaacgcatatgaatatactcaccactttgaactaatgcatctagaactctcaccatcaaatcctctgtgaataaccgtaaagctttgccatttccctttgcatttatctacactcattgtgaagactttcttgatgcccaattcatctagacagccaatcaaaagtgatgcaatgatatatcatttgtgatcaatgacatgcttgaagctaatgatccatttctgtaatttccaatatttatcaatctagtaagctgtcaccaccatgtaactacaagaagttgtggtagctacccaatatctgttaccaatgacactctctgtttatccttatcaaacaacttcttcaaagaatttttctcttggaaaaacattccataacaatctgaagtggatgtcttcctacaatgaaccatgtacatgagagattgttggcacaaaatctcctaaacctttcaaattccacaaatgaaaaaggtaactcattaagcattatcatctcattcacagatcttctaaacaaccctttatcatacttgattgttatcattacaccactgttatctcgagctaaaactttttgactatcactttcttcatacaccttggataacttgaaccatctgatgtgattggtcattgcacttgttcaagttttgactatgtcacactatatctctgtgccacagtatcgacagttgcttacagatatattgtcttccttttaaataaaatgcttccacacagatgctctatgagctgggttttttcctcggttttgttgaaataatcgaacttgatatctgagattttgttattttttctccaacaaaagaggtatgtggaccatcttctccatcaatctcttcactaagaatgccatcattgttgttttctaatgaattagaagccatctgagaattaaaagaacaaacaattatattagacaaacacataatcaaggacaaaattacataatcaaatgaagaacaacacatattaaaaagttaacaactagaaaaatacaaaataaaatgaggaacaacaattttaaaaaataatctttaatctctttatcaaggacgatatgtgaatctatgactcttaaaaagaataatgatgatttaacgttcataaactaaattctacataaagttagagagacatatattactgttcgtcaaattagcttagacattcaaacaaggagttaaagaatctgcgatctcataatcgtttcaagacagaagaacttatagtgaaaaatgatgatgatttgaaccaaaaatatcgaagaaacagatgatatagatcaaagctgcttttctcggattcgcagtctgagagggagagagagaaagattaggttagcgtttctgtttaacagctaattactcggtctaacatttgtatacttagtgttaattatacagtcttgttggagagattttgacactaaatttggttgttttggtgtcacgttgagatgaccttaaaattgtttatataccatttttgtttgatttttatgccttttcattttgtggtatttgttattatttaatttattgtcaaaatacattttatttgatatttttaaatggtttacaatataatggactgagaccgcctaacaagatggttgtagatatttaaaacaaataaaacaaaaaggccgcaaggcccacaacccaacaaagaaatcgaggcccaaaatggttgtagaaatttggtttagctatcaaaaggttcaagcggctgacaatagaatttgttgtctgtccaaaacaaactaccataagcttatattgccacgagtactcattcggtattttttttaatattcctattaagatttaagctgtaaataaaaataaattaatacaattcagatcaaatgaaatattaaacatgagcacaaaaaacaaagttatgacactacttactaggcttgtcaatttgaagcaaagcccgaacgtctcgccctaaatgaaatattttctctgttctatggactttgatgttttggttttattattgttccacaaaatttgatgttctaaattaatattattttatttttattaatccttaatagagaaaagagagaattagagctaatattattaaattaataataataaaataatatcaaaattagttttcttaatttgtgcgaaaaaatttcaaacatcgttcttttatgaatagaggaaatattaaacttgaccacaaaaaacaaagttatgacattacttactaggcctatcaaattaaagcaaagtctgatggccccgcttgatagctctactacttactacaaaaagataactatgtatgtgtagtaagcaaaccttttcttttttgtcggcttgtttaaattattttgagcttgaaaaagaaaattcatgtttttacttaatttaaataattttaacttttcatatttaaaaataggcaaaatattaataaataaaaactaaagaacaattttaattatcatgttagaaagttcacattttttatatttttgaatgttgtagaattttaacccttattctttttcctttattttttttgtaaataatattagtgtgataaatgatttgaaaaaattgtctgctttagagaaggagaaatggataaataagtttgttatttaaaattgtctagacaaaattttgttcagaacaagttattctctagaagaaagatttttgatataatgacaatatcatatcatcacaatcatctgttagctattcaagtaccttgtggacccaaggcgagataggctcccaatcaatcttgctcctttcttcaaacaaaagggtcaactgttatcgagataggcaagagaacggataaaccaagttcatataaatccaatatcaatcaaacaaatctcttattcacttttccatgaggatccagctcaaccaaattaatgcctcctttacgtagctcaaccaatctttgcgaattggttgtggtcctgccattgactgtgaatattttttccttcgtgtattcatcaatatatacaccaccaaatcaaaaaagatctggcaccatgtcataaatgtaactctttagaaaatgtattagctagaataacacaactaatcatagtaagcagcttatgatacttttaaaaaagatcggtagacaaatcattgaataatcggaggagtatgattatttgctacatggctaagtccaagtgttctctctcaacatcctctaaaataagatcaacaaaaaaatcaatcgctctgaaattgaaaatttgaaaatttcagttgagaaaaagtaaaacaaacacaaattcaactcaactggatcagatttaactatatatgaccatgtctagctcttgcagatttctgagccgttagaagtaagtctcgatgaaggagttctcgagacaataggctttgattgaatcgataaagaatttttgatgttttggattaccagttccatctatatctctttaggcatgtcaaaattctttttacaaataactcggcgaatgcgatgatatataaatattttagacataattttttttgtacaaggaatgtatcttaagttctagtttaacaccgtatttttcttattagattcaaaaaataaattttatatattgtaaatttgaatacaaatacacacaaaatatgtatatactaggatatgctccaaggtacataataggtctatatgttatttaaaaatgtaatgttaaaaatgtgatgatcatatagctataaaaaaaaatacaatttattttttaatgtatatttatatataatattgtttacgataagtagttttttatgttttgattatcgacgcatggatctttttaccctaaaataaataccgaaaaatagagtgggttaattatcaaattatataagttcgttctggttaaatagcaaatcttaaagtgttcttttctcacctcttcgtcaaccaagacgaatagcgaaagattcttatatactgttatcacagttaataattagaaatttagaaagaaaaatttgagtatattgttggcattcgtttaatacaattgagattatattaataattaatacaaaatacatatattttaaatagtaattagcaaatggacaaatgtaggtataaagagataaattagaataaaaatcgtttagttaatgtattttatttaattttaaaaattttaagaattaataaaaattacatttcgttgtaaatatatacaaaggccaggttttcaagttaatgtatatatatataaagaaatattttgttttctttgctaaaaatgtaaaattatgtgtgtctttattagtttctagcttttttttattttagtcgaatgtttaacatgtttttcgctgttatggtatagattgggccaacttgaaaaacataaagtccataaaatgccaatttgataagcccatataaaaaaattgaatttaaaaaaagcctacggtgaggatcgaactcacgacctttcgcttacgaagcgaacgcaataccactatgctacggaggcaatttgttcattttatagaatcattttagaagaatgtttattacttgttaaacaggctttaagtaactttcatgacaacaactttgacggaaacggagaccagaaacagacgccggcggagatatgtgcggaattgcaattgtagtgtgcggcgttcgtatcgaactctcgacactttcgtcgtctctctctgaaactgagactcctttcgaacgagtaaatctctctctccaacgtcagttgtgattttagtatgaattgcttttgggtttagaagtttagggtttttgttctgtctgaagtaatttagcatcattggtaaagcttgaatctttaatcgagtttgttcttatatagaaagaaagacttacacttttgagtttttatcgatggataatggtaatgtattgagatgagagtgaatttggttgttcatagatgagctaatttggtgtgttttcttggtttaaaccagttacaagtctctgttgaagatgttaaagctgtcttaagccaaagaggtcctgatagtgtaggagaaaagactattcatcttcgaccaaattgtggtcaagaatctgctactctctctgttgttgagactagtgaaggaacttataagcttgaggagactacttctttgggtgaattgcattttattggttctacattacagcttagaggaactagtcctataaggcaaccattggtggattcttctgggaacattctagcttacaatggtgtggtgttattcttaaggttttttgattatcatatgttttctcttacactatacgatattgatttgtatattttccgtacaggcgaagtatttggtggaattgaactcaacagctatgataatgatactgaagtgcttttgaagtctttagagaaagcaaaatctttagttccagatgttctttcgatgattaaaggtccctgggccattatatattggcaggtaatttggtaacctgctgctatttgtttatgtagcatttttttttactttctctaagagcatttttctctatcaggaaagctcgagaacgttatggtttggtaaagatccgtttggtcggaggagccttcttgttcactcgccaactgtggaagaccctcgttttcttctatcgtctgtttcaccagcttcttcagtttctcaaggtgctggtttgtattacttagtagagcaattttgtctctttatgtacactccaagctcaagtaacatctgttcttttgcaggattggatactgaaaatggtaatagccttcatagatattgggaagagcttccatgtggcgtgtacagtatttcttttggggtttcagaattatgtattcatggtgaagttacaaaacacgaatggagaaataccatctggaaagaattgattgaatgggaaaggaaattagttgtacctagacctgaagatctatcaacgtcatcgcttagtggagttcaggaagacaaatctgtgtcaacttctctaggtactgcttaagaatcgtttgattcctccagtcctgtccaaatctcaacatgtctgacaaggtttagctttaggatttgcgcagacagttttggtcgtgttaaaggaatcagtgaggcggcgaacttcacttcatagcatttatcaggtatgagcttaaacttgttttttctctgaagctatgtgttttcttctgaacaccttcgtattggcataaacagggagataaagaagctgtcccagtagctgttcttttctctggtggattggattcgatgattcttgctgcgctgttgcatcagtgccttgatccaaaatgtaaccattcccccacactgtttctgtctcggccaacaattctgaaactaatcaaaagaagtaatatctatttcttcagatgaagttgatctccttaatgtcagttttgatggtcctaatgctcctgataggatctccgccaaggctggaataaaggaactcaaaaagattgcaccttttagaaggttgaacttcaaaagccttttatgaaaaatgcatatatctgttactatctatgttgatacaaatgtttttggaattttcaggtggaaacttgttgagattgatgctgatctgtcaaaactaggctttgagacaaaacgtgttatgtcactcataaatcctgcagacacttacatggtaaacctcaaagtcttgagcattgtgattacattcctccgaacttgatgtgaattattcaatctttttttgctatgttctaggaccttaacataggaacagcattatggttagctgctcgtggtgatggttggattcacgaagataatggaaatccaagtgtagaggaaaataaccagcgggtcaagtataagtccgatgctagaatcctgcttgttggcgctggtgctgatgagcaatgtgccggttacggtaggcacagaactaaatatcgaaatggaaggtatatgattcatttatgtatacatttcttatggatgtaaactaatgttaacctcatcgcacaagttttattcatttttccagttgggttgcgttggatcaagaaatgaaattagatatgcagagaatttggaaaagaaatttgggtcgagatgatcgatgcattgcagataacggtaaagaggtatatgtcatcacgccacaaccacaaactcaaaaaaaaagtttattctttgtgctttgttcttaaatcttaaacgttacttgttcaggggcgattcccgttcttagatgaagatgtgataaagactctccttgacattcccttgtgggaaatcgctgatcttgagcaaccaagtggaacgggagacaagaagattcttagacaggtgagtaattaaaaagataccatttttactgtaagaatgcctcaagaacattccagaaacttcataaacctgaattgttgcgtaaaatcttgaaggttgcaagcctgcttggtgtacatgaagttgcaaagatgcctaagagagcaattcaggtaagaagaagagaactttctgagagaactcagtttcaaacgagtaaagttgaaatctttttgttgtgagctctctctctctcactgttgctttggactttggttgtggttttagtttggatcaagaatcgctcgtgaatcaaaccggaagaattttggaagtaaccgtgccgcaaaccaggcttctgccgggagcgtgagattcctagcaccgtcacactaattccctctgattcatgttagatcaatcattgttatacattgtatcctatacaaagagacattctttcaatgatctcaaaactggtttgaacactgaacacaaatggactaataagaggacatgttaagacttaaaccacttggttcggtattttgctcaatttcaagggtaaaattggaaaaatcacaagaaaaacaaaagccctaacattattgtctaaaatcaattttctcctccggtggtgatctctgtgctccggcgcataaacccctgtaaagccaataacttgttgttccccaaagtttggttcttcatgttggaaaccgaaagcagtgtctgcgacaacatcgccggcaatgagaaatggcgagcggaagctgaaattggtggcaacgagagagctctgcaagcgcttcgagaactcattatcttcccttttcgttaccctctcgaagctcgaactcttggtctcaaagtacatatatccacacctctgttggactcatagcttctctctttcgcttaatttgcttaatttgacttatcattgcagtggcctagaggattgcttctctacggtcctcctggaaccggcaaggtaaaaactctgtttctgtttgttggatttttcaaaaaactttgatcttgcagaagctaattcgaccgctcttgtattgaaattttggtttttgtagacaagcttggtccgtgctgttgtccaggaatgtgatgcacatttgattgttttaaggtactttgttatgtagcttctgtatagtttatgctttggagtaatagaggctaaagctaatttatgatttgtctttgtttgtcaaatactctgtttagccctcattctgtacatcgagcacatgctggagaaagcgagaaagtcttaagggaagctttcgctgaggcttcttctcacgctgtttcagacaagccttctgtgatttttattgatgaaatcgatgttctttgtcctcgtcgtgatgctaggtattgcttcacccctagtttatagttgctatcttcagagagatctttaagagattgagaataatcttgttctctttaaaatgcagacgagaacaagatgttcgtattgcttctcaactgtttacacttatggactcaaacaagccttcatcatctgcaccaagagttgttgttgtagcatccacaaataggttcttgtctaccttaagcataatataagttgattatcaacattggttttgaatgcaatgatccaatggttttccccgatcttgtcaaaagggtggatgcgattgacccagcgctaagaagagcgggacgatttgatgctttagttgaagtgagcacaccaaatgaggaggatcgtttaaaaatcctgcaggtaattatcgagttcttaaatgggattttcgtatatagtaagtttgtttgtgatcttcatgttttctatttttttcagctgtacacaaagaaagtcaatttagatcctagtgtcgatcttcaagccattgcaatatcttgcaacggttatgttggagcagatttggaagctttatgtcgtgaagcgacaatatctgcaagtaaaagatcttcagattctcttattctaacatctcaagacttcaagattgcaaaatctgtggttggtccaagtataaacagaggcatcacagttgaaatccctaaagtgacatgggacgatgttggtggtcttaaagacttaaaggtcaatactttttaaaaatattcattttgcactttgttgtcctgttttctccattgcgattaatggtttttttttccttgtgacagaaaaagctccagcaagctgttgaatggccaatcaaacattcagctgcatttgtaaaaatgggcatatcgccaatgcgtgggatacttctacatggtcctccaggttgctcaaagacaactcttgctaaagccgctgcaaatgctgctcaagcctccttcttttccttaaggtatagattttgatagatcacatttaacaaaatccccctttggttgtgaaacttgtttaaagaaacttattttttcttgtgtctttgtgtgggtgtgcgatgcagctgtgcggagctattttctatgtatgttggagaaggtgaagcattattgcggaatacatttcaaagagctcgacttgcttctccaagtataatattctttgatgaagctgatgtcgttgcctgtaaaaggtttgtctctatctctcccaactcttgcttcgtgttatagactcttcttaacatgtttatttccttgggtcttcgtagaggtgatgagagctcaagcaatagttctacagttggagaaaggcttctatctacactgttaaccgaaatggacggtcttgaagaagcaaaggtaaacaaaagctcataggcttttaaagattttatctttgttattgggttgcaatgatattgatcgggttttggtttaagggaatcctcgtcttggctgccacaaaccgcccgtatgcaattgatgctgctctaatgcgacctggtcgatttgatctcgtaagtcctcatattggatcttttgatcacacgagttctgaaatagcaaacctcattgctaccctcttcttgatttaggtgctatacgtgccaccgcctgatctagaagcccggtttgaaatactgcaagtgcatacacgcaacatgacactaggagacgacgttgatctcagaaaaatcgctgaagaaaccgatctcttcacaggtgccgagctcgagggtctatgcagagaaagcggaactgtctcacttagagaaaacatcgcagcaaccgctgtcttcaatcgccatttccaaaccgcaaaaagctcgcttaaaccagcgttaacaatcgaagaagtcgaaacttattcatcattcaggaaggcggcgaaaagatctgattcgaaaccgattccgattaacaaaaagaaggcgacttccaccgtcttcggattctcatggcaattaggtgttttgagcttattgttgcttgctactggaaactattacttcaaccacactaaacatgaattactagtagcttctgctacatgagacttgaaacagctcaaagttaaaaaaagttgctaattttgttttattcataaataccaaaatatcttttgtttcaaagttcaaatttttaaataataaaacggctaatgattattagattcgaacaatgacaaagattggccattacacatgaatggcccacgaacctcaccaccgtcgtgaaatttctttaagcaccaataatttcactggttatctcttactaattaattactttttacgtgttctaatccaaatcaacaataattatctgatatttcttcataaaccggttttggaatttagctgaaagatgtgaattttattttgtcttattaatcaaaaaatttgaaatcgttttgatttcaattaaaccggaaccctgacactaacaaaaaccggtctgagcttataaatagagtggctcgctgatgactcagttagtcagctccgagtctgcgttttacttcttctccttgagtttcttcttctagatctgatcgcgaatcaccaaaaggtttgtttcttaacccctaaaattcctccagatcgctttgatttcgtttctctgatgtcttagacgaagttagatcgtagattcctatgttttgattcctcgatcatgcttcgaattatggtgtttttatcctcaatttttggagatttggtttctacggattttgtagattcaggaatttagaaatggtgattcgatttcaatggttttagatctgattcagtcttcactcttgttccactattttgaaaattggctaaaaactaggtttcgtcgtctaattctcccgacgttcttcgagaaatgtgaactttgaggtgaagattttgcgttagcatatgtggttttgtataattgacgttgctactattctgattgtgaattttaagcagcattcacaattgaattgagtcttcactttgttcagctctgaatctatcatctctgaatgttggcaagttatagtttcttattatatttcggtgttttggtttgttgtgctaggttttattttatacaatgggtcgtggaaacagctgtggtggaggtcaaagctcattggattatctctttggtggtgacgctcctgctcctaagccagttccagctcctcgtcccgctcctactgagtctaacaacggacctgcaccaccagtaacagctgtgactgcaaccgcactcacgactgctactacttctgttgagcctgcagagcttaacaagcagattcctgctggtatcaaaactcctgttaacaactatgccagagctgaaggacagaacaccggcaacttcctcactgtacgttttcgtgtccgttttactcgaatacccgtgaatcgaaatggtaatgatactcactcactctctccctttctctgtctatctctgcaggaccgtccttcgaccaaagttcacgcagctccgggaggaggatcatccttggattatctcttcactggtggcaagtaaaataattgcaaagacctttatctatccattgtctttgctgcgttatctcactatgaaactgtttgatgtgagcctttaaatgataagaagtcggtttcttgtctcaactcttatctgtaatattttgctgaaaaaatgtttgaatcaaaaacttcccaacttgtctcttattaaccatcaaatgcgagtacaacttttaatccaatccactacacatttataagagatttggcataactaagtgattcgaaaacagattaaactagaaccgtcatttaggatgttgaggagcagggatgattccccattttctacgaacttgctccaagtcttcactaaagtgacgctcatagtacacacacatgaggtcagtgcattgtcttccagcacgaacagcccaaggaaggtaatgcttcaagaacattgatctttgcttctcgttgaacctcacagtacctccaatcacagagagcatacacatcggaagatacatttgctcaaactcgataactttcaaagacgactcgccgataagattcgtaggaaggccaaacagagtgtgccataagtcgtgaacttcgcgtgcccgtgtcgctacgtaagccaattcatccgtctccatgaatcttacgggcggacgatcatcgggagagaagtttctagatcccatgaatttagcatatgcagctccaaatgtgttttctggtagatcccaagcatgacctacttgctctgacacaactcgaggacgctccaataatatagccttcaaagtaaagataccaccaaagatcaaaacaccattgcttactcaacaatataaccaacatcaagtaaaaatgttaatcaatttaacatcactcattgcttactccagaattactaaatcgaacaatttctaaatcaatcattcttaagcaaaatcaatgatttgatcaacaataagagagaaattgagtgatttgaaaaacgtactcttccttcttcgctcttcttcattctctcaagaaccatttcaaaagctggtttaccggtagtttcgccgagagcagcgattagatccgctctacgaggatcaaccaacgcaccgagagcagatcccatcgccacggccgcttgttgccatcggctcaacggaactcgagctctttcaataatcatcgttccttggtagataatctctctggttaaaaaccaaacggcgattctaagaatcagattaaagtcggtgtggaagacgacgacgacgattttaaatcacacgcgcttatgtcctcgcgtggactttctttctgttctcaagatttgactgaaagtttttgagagagatttcaattggggcctttagtttataactccattgtggcccatcatttaatgttcaaagaaaaaccgaaaataaatgactgaaatataagaacttgggccattgggtaaaaaaaactgagagattccctagtcaaatccaataagaagagcttttggcccataaatattgtaactgatatatagttatatgtagttaataaaattggcaaaagcctccggcgaggatcgaactcgcggcctttcgcttacgaagcgaacgcaataccactatgctacagaggcattgatgcttaataagtatataatgtaatatttttataaaaattaatttatatgtacacaaaaaacaactgaatattgtaattattttaaaatcttttctagagtaacccatagagagaaagaaacaaaattctagagtacacaaaaacaacaatttattctcaaatttcaattctatctacacaagaattcaattccacaagactaacctatgtaagctaaataccataaaaatggaaacctcaaataaaaacaagagagaccaaaaacagaatttcatctcaaatttaaattctcaacatgtacccgctttctaaaatttttcaaaaaactcactttgacgtttcccaaacgtttgtgtttccgcgtattcgcttccaatttcatgcaatccaggtgttaagtgtatgtatgataaaaaaaaattttttatcaaacactatttatattaagttatcgaaaagagattttctgctagagagagccattaaggaaccgatgtgcttatatgggagaaaaggctattacgagcccgagctttattagctaaataatctggtcgaatattagaattatgaggaagaaatctaatacgaaaagaagggaaaaaacaaactaaggagtgtatgtatgataattaccaaacggttatgtgtcaattatgatttaatcccgcaacttgatagataataagaaaatgatcctccaaaataacaaattgtctgcgtctctgaagtctcaagtctcaactatcaagtatctcaatagtgtgtatcaaaacttaaaaggcagcagtaatatgtcaacacgtgtcagtacaggcacgtgatgtgagtatgactgtttcgttcaatcgcaacatatgctaaaattatagtttttggaaccaacgttagatcgacacgtagcctactctgtccccttaccatcaacctgcgtaagcttccctcatcttacgttcttgattgttagttaaaagcaaaactaaagatttgaagagtatcttcaataaagtacaattataaatgttaattaataaaattgaatgttttacgacttttttggccaacttctattcgtgttacctcgtattatgaactaggttaaagttactttttctaatacatatcttttagaattttatactccatatgatttctattctctatctcactctatagagtaatcaaaataatcaagcgattcttcaaattcatataacttagaaatatttgattcgttttaaatggatcttgatatttgataattaattaataaaaagatttgatagattattataacatatattttatattattgaacacaaaatgatgatgtaaatactaagttagcgtttttttaatttggattaagaaacacatacggactgaattagtgttttctgatatgataatctaacaatcataatctacttacgatcatatattatataggcgaacagcagcaattgcatgggttgcatatattatctatattatatatagatttatttttcagacggtttaaaagttctttttcaaacaagaaacatctaacatgtactatatttgcaaagccagaaagagctgttaaattgtgaaagagattccaataaatactagacgcagaaaggcagaaaaagttgttacaaaatcatgtctcaacattttaaaatgcctatggtccatcgagtagtaactagggttttagaccatcatggggtctaattaatgtagtttcaatttgttagtctaattatacggaagaaaccctgcaaaatgatgtttgtaacctatagccatttaacaaaattttaatattttggtctgcaaaatcatattaaatgataatcgtacatacaagggacctctccccaacagaacaagagaattgctactagctactagttaccccaaatatatacatacataaatgaacagaattaataattgagtttctgaaaatgactattgtttttttttctttcgaattgtactaataaaatagcttcatgtggttcttgcaaaacttaccttttttttatgtcaaccactcacattaaatttaagaaaaaaaaaattggttatataaactggagaacaatactttacaaatgaatcaacaacgttcctaagtctaaaagtatggataaatcaagaattaattatgagtttaccatttgtggcatttgtaaatttttcataaaattataaaaatacgattaacatgtgttttattcgttatgtttgaatttattaggttttatgtgttcttataaagtatgtattttagtattaaaaatcgtaaatttaataattttaaatgatcaaaatagtaaatccgtaaaattttaagaaaatggcaaaattcataaatgtcactccaaaaaatagtaaaaatccttaataatttcagaaaacactatgtttcagaattgaaaaaaacgagaaataaagacaagagaaaaaaagatactaaatatatcacactagctcccatggaggaacttaaaatcgtgagaaaacattttgaagaaaacttgtcactttcatgcaggttaagtattatcaactcttagatatatatttagctcataaataaactgactagtctacattaaactttagtatacagagaaaaaaggaagataaatctcgtattttgaaatttttgcatcaatcatgcatcttaagcctgatattaagatctgaattctttcaatagaacgatccaattgacatcttatttctaatacatctagttgaacaataatattatcttctgcaaatatgactaactaatacttgagccttattccaaatttttcgaaaacaggacaataatgtatcataattatttctttctaattaagcttatcatatataattatgcatcatttaataactcctttttcttaagtgattactgattagaatgattaataatgtatagaccatctctaggagtaatttgtggagacgtatagaaaaataattattatgactattaggtgagtacccacgctatgcgtgggttgttgttttgaaaattgtttagaaaaattatgtttaactatttttattgttaatttatgttatttttgtgtatggtattttgtagttaataaagttatattcattttttgtaattatatgtgtatagttagattcacttttgattcaaatatcaattatattctaatcttttttcactatcatgaaatacttacattaacaatacatgatacaatggtatgcaattatgtttacttatttggtttgaaagttatctaaattgattctaagcaaaaaattcaatctatgtattctctcctaatctaatattccaatcataggctcatagctaaatattggattgacttgatttgaataacaaatgtataactaactatactcatttgctttaaaagatttcacatgaaagagaaaaaaaaaaagcaaaaattaaatagtattttagatcaacatttttaggtttctctctttgcatttgcatatatctctattggagagagtgtcgtatattaaattttttagtatatataacatctcaaaagaccattacttaaaaaaatatgtatgtaattattaatgttatccatttatcgtaaagcacaaaaagaccttatcatatagaaaaaaaaagtaataataagaaaatactaagttaaaattctaaactaataaaagttagcaaacaagtaagttgcaatacccgaaaatttctactcgttatcaagtaatgactattaaaaaatagcaaaataagaaaagtaaaatgaaagtagtgtttaatacattaacatgatttttcatattttttctttttgatgaagacatttagttaagaatgggattaatgggtgattcaatgcaatgtgatttttttttttttatcactaagttttgttattttttaatgatattaatttagaatgacatgtggcactcattggtgtgatgatgtgttactcatatggagagtgttggccaactttcatatatataattttatcagagatcatttctaaactagacattttaaagttgtgtattatctacctaaattatccatataaaagatggaatagcacattgcaagtattatatcgtatttattctttttagatgtttcctaaagcatcaatctatatgttgcatgttgtaaggtcacaacttggaaccataaaagaatggtggaggatagcaagtgcgtagaagataaggatcattttacatgataatctggataagacatgcgcatatacatcaagtttccatcaacaagatttatagtacccaaaagaaagaaagaaaaaaactaatattccatcgatctatagaagttgaacaaaataactaaggtaccaagtgaaatatgagtcagcaagcaaagttaaaaaaaaagttgtgtgagacatatcacatgagtaaattaacaacaaccatcatcatcatgatgtagatagtataagatgccatgagaagaagtgaggaaaaacaaattaacctgacaagaagcatcctaaaaaattaacctgtcaaacaattaccaacctttaaagtgaaaaaaaaagttgaaaacactaaggctttgagagcttaaatgttcataaacaattttcctttttcttgccaagatcaatctgcaatttttgtgtcaagcatgtacgagttattgttataaataaatctagagtcgttatgtgagttctactgtattttatgaaaatcgattaactagtaaaatacatcagtcttcttaagaagagaacctaaacacgaaaccctctaataaatgctagattgcatattcttacacatctatattagtgtcaaaaacatgattggactgattttatagtattgaacaagaacgtgactaaattttcagaaattggaaagaaaacaaaaacatgatatatttcaatatctaaatttcaccatatatatataaaaagacatagtgcatgtgagacgtaaaaacctttgtaaataaattttctctttaaatagtaaatagtaccatatcagattaaccatttcagagtgacataatttgtttgtaaccgtatagatccgttttatgcattaaaacgatcgtgaagtagctgtcatacgaaagaacttgtcggcaagagaagcaaagcataagcagaaaaaaacatatcttttagaagcctatcattttcttacttttattcacaaacacacacaatatacattataagtgttatctacataatctaaacgtgtcaatacctgaaaaaacaacaaaactttatttgcacttctttcatttcatgaacaatacataaccagatattagataggacttggacttgtgaatatgctctatttaaggcatctttataggttatatttagaatctttttcttatttcttttttgagcatattattaaactatggactagatctgatgaaagaaagcaatctatttatatattatggtgtaaatattatctttaaaaaatccaatggaggagagtgaaagagaaaagttgaagcattttgtttggactatagagagagagaaaaaaagatcttaactctccttagaaaagtactaggaatcaatttttattttctgcaaaaacaaaagtgtaaaagaaaattaataataatatatattccctgatgaagtaagactaaaataatgtaactacacaaaaatactttttagaatttataatattttatattaatttttaaaaaaggaaagttgataagattggatataagtttggaagcatttatttggccaagaatggcttagcatctctgcaaaaccaacacaaagctatattctcttaaaaatcagttcaacaaaagaagaacctgaacacagttggcccaccaccaccactaccacaatctcctcctccaccaccaccacctagtcaccggaaaccaattcatgccctagattaagaaccagaatccttttgagacaagatctatatatacactctacacatttacttatacactttatctagatatagatgtgtgtgtgtataaaggttctttttcattacttgttggtttagtgataaaaaggaggagagttttcagttgggttttggtttcttggtgagagaagagagaaaaagagaggatgggaagagggaaagttgagctgaagaggatagagaacaagatcaatagacaagttacttttgcaaagagaagaaatggtttgctcaagaaggcttatgagctttctgtcctttgtgatgctgagattgctcttctcattttctctaaccgtggcaagctctacgaattctgcagcagccctaggtgaaaactctttaatctttgatatatctactttttccctcaaagtttctatattttgatccatgttagggttttgattcttaaggattataaaggatatgaaaactttgttgtctttcttgatttagttacaattaattagttgattaactacggtttatttattttgtgagttcatacgcataaatctggctcgtaaagagtgagattaagtgaacgatgatcaaagtacgtacaaagcgtctaagttgctctagatgatgattaaagctagagagtagagactatggctgaaaaaagtacagtagatatgtgtagaagctatagagcatatataaatatagttaaagcttttacacatgagattgagtgttgttgatattgtttccaaaggattgatcagagtttccaaagagactaagaattgacctctggatatatacacaaagctgtaaaagatataaaaaatactttgactacttctttaagttagtatctctctcaagtactacttatgatcttattaaagttataaagagacaactgtgatgatactcaatttcactagctacttatcatttccacataaatttattttatttttcttgcacaaacatcatgagattgatacccattttgatgttcttgatgtttttacatggagatgcttttaaggttttttttctatattattctcataatgaaatttaaagtttggtttatcaatatatgttaaaagttaaaatgatcatttgtttttatgaaaagtggtatggcgaggacggttgataagtatagaaaacatagttatgcaacaatggatccaaatcaatcagctaaagacttgcaggtacatatcttctctttcaatcaaagactgacctcaaagttgtccttaattttattttaaattggcaggataagtatcaagactacttgaagcttaaatcaagagttgagatccttcaacattcacaaaggtacttatatatcctagtccatctaaatgtaactatatatgctcttgttactaaatgtttcttctttttaggcatttgctaggtgaagagctatccgagatggatgtgaatgagcttgagcatctcgaacgccaagtagatgcatcactaagacaaataagatctaccaaggtatatttctaagcttacaaaatcgacaaattttgtttcgaatctttcatcctaaatcgttgtttcgttttcattgccaggctcggtctatgcttgatcaactatctgacctcaaaactaaggtacatactttatataataaaagttgcacaatatccaaatacaacaagctctcattttctcaatttacaggaggaaatgttattggaaaccaatagagatcttaggagaaaggtagctatcggaatcttttaccgcaagaaactgaaaccatttgtcatttgaaatcttcctattctttctttctcagttggaggacagtgatgcagcacttactcaatcgttttggggaagttctgctgcagaacaacaacaacaacatcaacaacagcaacaaggcatgagctcttatcaatcaaaccctccaattcaggaagcaggtttcttcaagcctctacaaggcaatgtagcattgcaaatgaggtatctacaaacaaatagtcaagacccttgaattattttacctaatcagaaatacttaacatttgtttgtgcttctttattgttttgatataattagcagtcattacaatcacaatcctgcaaatgcaaccaactctgcaacaacatcacagaatgttaatggattcttccctggatggatggtctgaaaacaatacatatctatatatgtacacatatgtgtgttttatagatcaaagatcattgcttgtgtcatttgatttttgccagagaaacatagttcattattacaaaactttgttatataatcaaggctctaatgtcaaacaccagattattacttttttgttctttgttttttggctctcttgaaatataaaatattgttttgggagcttatttttgttttatttttgaacatcatatgaatttgttagattatgacaaaagttctccggattagaacatgtctcaagaattggattctgaaacaagtagtgctctgcatttgtattaagattgtgatgttgataattaaaacgactaaataatttttgccaggttggattataatgaacaagtccaaaatgttattttaattttattttcatggcaagcacgttcaagaaatggctccaaccaaaaaccaaacaaacataacagtatttaaaacacaactaaaacctcaaagaacagagagaagaaaaacaagaattaagaaaatggggaaaccagcagggtattgggtaaataagattaggacatcattcaaaggaggatcatcgtcgagcaaatcattagatgaaggaagtacttcgggttcgagaaagaacggttcgaagcatagtaagaatctgaaagcagaggatgctaataagaatggtgaaggaggaggagttcaagctgagagtgggaggaaagtgatggttgttgtggacacaacttcacaaactaagaatgctcttcaatgggctttaacacattgtgttcaagatgaagataatatcactcttctccatgtcacaagaacacccgtaggacaaggtatattactcatatgttgcatttactagaacctttaatatagaggtaaaaccattagagccaaaactcgaaaccttgttatatatcttgcctagaaaacagggtgaagaccgcttcttttgggtttttaggcgaatcagaccttagatttggttttgggcttttttgggcccaatgttgttttctgtgtggtagatttggttttgatttgagtatggacaggactatagcatatttgacatctataccttattgagtcgctattaactaatgtgatcattgtgttaatagctatagatgagacacaaagggagagaaactcaagggctcatgaactagttcatccattgaagaatttttgtcaactcaagaaacctaacgtaagctttaagcaacagcaaactgatattgattcaaaagttctcctttgttgacattaaggtttattttcaggtcaaaacggagatagtggtggttgaaacggcggaggagaaaggtaagacgatagtggaggaatcaaagaaacaaggagcaggcgttttggtgttagggcagagaaagagaacctcgaagtggcgcgtgatttggaaatggcgtacgaagggaggaatgggaggaggagtggtcgagtattgtattcataactccgattgtatggctattgccgtaaggaagaagagtaacaatggaggttacttgatcaccacgaaacgtcacaaagatttctggctcttggcttaatttttatttcaaacaaattcatcccaaaatctttttttttttttttttgtaatcgaaacgaatctttttaaagaattcatgttttatggattaattgataatctgtattcgttataagaccttttcttatatatgtaaagacttcatatttgtcaatgtttgttattgtgttctacctcaaagtataatagaatagtaacattaagcaaagctttatcaaaaagagagaaatagtataagcagagaaagaagtcacatagagcaacattatttcataaagtaatattattacttcaacatataacggtcataccctccgatatctcctcctccattcccgacttgaaaccggtaaacacatgctttggtgacggctccgacggtaacgactgtagttgtaacggcggttattgtgaaactgaggttgatacctattagagtgaggacaaacaggacagtaatagttaggagacccatatgatttgctttatctcttttgttcttctacatattactatcataagcagaattataagttatatttagttgtcttgtatgggaataatagaagttacgttattggaacaaaaaataaggggaggtcaagatttgaatggctgatttattgaaacgccagttcaatttcctaggacgtgaccaagactagagaatttattaatgtaatgtaattgcatgttcccttcgaaacaacgtttcgggttactaagcaaacttttagatatagacgtcttgggaatttgaatgcttttgttcataatcaatgaacgacaaaggatagtttgtactaagttaaaccgttctgacttctcgtagtgatatattcaacggaatattgtggttagtgcgaactcatccgtcagtagtccaatccatactatttttgggatggacaataaagcgatgcagacttagtttaaagaccgtctgcagttagtccgcaacagttttcttttatttttgggggtccgcatcattacggactataatttgtgaatgataaataaaaagcgatccaatgtatagacgcttttgtccgcttagacaactgtaaacattgatatattctctaacttgtcagtagtttattctctaaagcctacattaatatatatgcctattatataacctgtaagtagttaaaatagaataaattttaatttcactaatctcctaataataggctaatacactaatcatttatttttgtaatgttatttttctggcagagtaaacgagaaaaaaaaaaagatagagaatggagatacactaatcaaggttgagaaactattaatcactttagtataaggaaaataaatcataactttaagttgataaacttaaaattttaactattaaaattttggtgcagcacaaattaattaagcagttaaatcgtattacataaattatttaaagagagtatttaaaaatagaccaatataaataggaaatatactctagtgagcccaaaagatgactagttagtaagtacaatgctttaagttatgttgaaataatatgtgaattaatctttaatgttatatatatggttttcttcttgataaaatcataagaataaaacgctgaagacatcgtctagcccacaattgggtagaccaaattctactcgatattgtcaagatctaatttgcaaccaactcttcatgcgatacaaattttgctattacgttccttttgcatgtaccattcttaattttaagtaatgttttgtaagtaaatatttttgttgaacaattaaattcatatctcgaatagatatcacatgaatataataaaaggcggacaactccgttgtcaagtggatgcttcttgggtagcagatggtaacacatccggtctcggattcgtgatcgatactccatcaggaatcttactcggttctagaggtaagtcaagagctctatccccccttcaggctgaactggaggctctcacttgggctatggactctgcgttacatagaggtcttgactcggtacactttgacacggattgctcgaagttggtgaaaattattgaagaagaagatccgggaccaatctttgaaacagaaattgagttctttaatcttatccgtaatcgtttttagatgtttttcgatctcacacttttctagaactttgaatatccgaaccgatacccttgcaaaaggtgcccgttctcgtgatcttatcttctcccatgtaagttatgaggttccggagtggttggttttcgctaccaactttttcgaaccaaactaataacatatggagttcttttgtgtcaaaaaaaaaaaaaagaatataataaaaggccatcaacttgaaataggaattttgactatgaattttatcttcatcataaacctcattaccattatcagcatatatcactatcttcctcttgtcccatatagtttcaaattgtataacttatcatctaaaattggaatcgagtctatatttttggtttgattgattgctcgttttacttaagtttcgtgttttttttgttggccattcgtcattttcaaattataatttaataatttagaataagtgactattgaacaacaaaacaagcaaaatagataaagtttttatataacataacaacaatcataacgtaacatggtacatttgacatatcaaatgaaacctagctacattgttattattcttattactcaatcataaaaaagaaacctgtggtaatattaatcccacatactcaaatattcatttgttacgcagatttcgaaaataacctttcgggttgctttcgaaaacttccctgaaaattcgcccatcctttcctggtgccttcatggtcttcttgtggaggcccgaactcattccggagaataaaccggcaatagctccgacgacacctatgaccgccatggctgttccaagatatgatgacgtgtcttgtttctggttattgttacggtcgttgtcgctcattttgatatactgatgagtgacgattatcaagattctaagattttagcttcttctttttttaatctttcgagtgtaaggtcatgtgatttttatagctgtagttgtgatgccaaacgatttattagatgaattaaactctttgctcaatttacaaggaggaaatcttgattacgattttgtattagaatttattgcaacagttcggaaacggttgggattttctagggaagaatgtgaatatacataaacttcatcgggaatttaagaaatttaccgtacctgatctctattaatatctccaaaggtcttagaaaaaaaaaaattctccaaaggttatatatacgatacaaaaaaaatacgagaaatttgtctttttttttataatggtggtaggatgatgatagtatgacgataatgatgatgatgtgataatgatgttatgattatgtggacgccgatataattgatacgtgcatgtcaaatgtcaactagctaggaatctaggaatctaggatagtccaaatttgatatgaatgatcaaattaagatttggtctgcctcgttcttttgtgcctcttctggtttgtaatctggttacaaagggtctagcttgtgtttgccccaaaaaagaagggacctagcttagcttgtgtttgcaactttgcatgtgcatatatattttatgtatactcttagaaactaaattcacaactacacatgtaacgtcgttagatatggtaattatatattttttcaaaaaaatcatttaattaaacgtaggtgtttggaacaattgaaactctatttttcattatttatttataaaatttattagcaacttccactttttttattttatttttgtctcttatctggttttctactttgtttgggtcagtcctttcatatatatatttttttttgtcttttggtatttgtcggggctgctggaacattattttataacaaaacgagagaattatcaatttagccgtccaaaattatatgtaaatgatcgtgatgagggcaatacatatcacaacaaacaattttaaattgaacttttgttttaaaataagaaagttcgtgggtgcaagtttttcttaatttgattttcataaaccataataaaaaaataaagaaagttatggatacaacgagtgacacgtggcaaaagtcatactcaaaggtgtggcacaccaatcaacaaggatcatgacccaatatttgttatgactttatgccaaagttatcattattatatatgccatcactcatattattatgagcaattccaaaaaatctatcacattttgaaatagatgtttcaacaggaccatgtcaaatgaaatctaatgagatttaccaaaccagcgattatagaaaacgatcgaaagtgattggtaacaaacaataaatcaagaagaatccattttatatacaaccacaaatataaaaaaccaacatttacttactacacaagaatctatactatagaaccctgtaaaaatgaatctaaactttactttcctaaaagctttatctacatattcacacaatgtactatggttatttacaaatagaggtaacacctctttcaagttttaagatcttatcaacccgaaattgacgaaagatctcgacttgaaaaccccgaaaagaaaccctgttggtgaatcttgaggactcggtttcgcgtctgtgtttccgcctttcacttgaagtatcgtctgaccgatgacttgtctaatggattctatggtcttggtatcaacttggtagccagaagcgtccctcacgtagaatgtgttaagagctttgtctccttttgttttcacttcagctcttgttactgtgagactgttttcgcggaagattcgagtcacatccgagagtaacccgactctatctgaagtgcaaagctcaagcttcaacccctaaaacacatggaaacgatatccatatgttaaagctacaacacacaaaagttcttatgatacttcttcaagcaaatgatagagagtttttacctcagagactcttctttgaatagctgcttttagacatttgatcactcgctgtctttctgcctcggatttgacaggagatccatccgtatgtcttatgtagtattcctacaaaaacccgagaattcagatgatggtacaatatacaatatgtggatcaacatcaagagcttctatagagcctaatgatgtatatgtacctgataagcttgggggccttcagcgtcaatgctagcatgtgaaacgacataattcatatctgtcagagtgaagacggtatcgaaaagaagcttcggtctgtctttacacttgatcatcacaatggagtaatccaaatcatgcaaattggagacatccacatctggaattactctcccacatttatcctcgtcatcgacattgttctcccattcatcataatctctatctgcaaacatcaattgatgaagcttacggtccgtgtgagtctcattaagagcagaagaaacagtggttttcggttcacggaatcttctgccactgcttccacctgtaagcacataaccaagaagtttcctgattttggacaacctctctggatcagtgattgcagagcacgtttcttcatcggtcacttgcaaaaccgctgctgcttttgctctatgtgtccaaatttcagcgtttaccacattgcattggaggtccataagaacagcacataactcagacaacaaaccgggtctatcagttcctgttagctcaaccacagtgtagtcgacagattgtttaaccccaatggttgatctcattgatggactgaagcaagaagactcatcaggaccaagagactgcaatcacacaccacagaaagagtcaagtaaccaaaatcaaacagaaaacaagagacaatcatatcacttcacttactttacggatatattcaagaacaatttcatcggtaactttgttcccatcttgatcagtaacattgaaaacatccataaaccagccaccatcagaggagatataagctttcttaatagtcagattaagctcagtcaaaacttgaacaacctccagaagtatcccatgtttattcgcactatccacctaaaacacaaatcaaaacgttcatactcttttcactaaatcaaaacctaaccatatctcatagacgtttcaataccttaatgacagtaacatctttgcagacttcgttatcgatcacaaccctgaaataatgataatcaaactaaactcaagtccaaattcgaagaacaaaacaaacaattcgagattagtcaaaaaattaccttggtggattcactcttctgatgaacttagcaatctcatcatccatattatatgaatagctcaagcaaacatctgtccacaaaaaaaaaaaaccaattccattagattcaataacaacgaagaccccttttgggaaaaaaacagagagtaaaccctaaaacgatcaaaacaacaaaagactcaaaattgaacaaaacccagttacgaaaacaaatcataagatacaaatttggattcaatcatcggaaaacagagagaaaagtaacgaacccattctcgatttttcgttggtgattgattctgtgaaagatcttcgcgccaataaagaaaggggaaattgaattcttcccttgtctatttgatgatgatgatggaattgtctctggtggaagaagaagaggaagactttgcaactgaaattgccagagaagaagaaagtttgttaatttatatatataacgaagaagaaagagaagagaagagattattaaattgagaaaaacagagtgagagagagagagagatcgaagaaatgagaaaaattactcagagtgtggtgtgtctgacacaaatttagccgacacgattctcctcaaaaccagcaaagaagagagaaagagtccacacacaattttttgttgttgtatttgtgatgaggaatgaggaggattctactcataaatacccgatgcgcacgttagcagccgccctcttctttttatcagggttattgaaccggttttatcccggtttaggagattcatcttaattaagtagtagattatagacagcactattataaaccggttttatcccggtttaggagattcatctcaattaggtagtagattatagacagcactattatagattcttctgtttatgagatttatctttaattggtaggaaattacagacaataattagaaacaaatttgatggtgttttgactcaatatttttctcctattcatggagattcactgggatttcaaatgttatttttttggggaatatagatagaaaaatattagaaaatacaataattgtcatgacaaaaaataggtaattattaaaattaaatctttgaattctaactttttctcataatatatatagtttaggatatatagtagtgtcatgccaaaccagagatgctaatacctagcaaatatataaacataatttcatagtctatacattccaaagaatcagtcatgtaaattaagagatttgagaactaaaagaagactaaacaaatgttcatattaaacttaagtacttaaccaatcttaaagaatttctttccatagtggtttatgataatattgtgtggttgtttcattgcccgaatttaacttcacaaagtacatgcttggatctaattaagccctaattatatcaatccgatgaaaaattaatacaccaagatttcttgtatactttgcaaaacggttttgtccaccaacagtaatagacaaatatcaaaagttcttttaccaaatctttttttttgtttgtgtgcaaaagttcttttaccaaatctaaagaagaaaaaaaaaaccttgagatattatcacccaaaaaacaaaattgcttaaaaatctcacaattgtgaaatggtttctcaaaatatcgcaaactaaagtttgagagaagttcacaaatctgaatatcttgaattttatgattttggtatagttttggaacatggaatatatgtggtaatttgaaaattactattaatctatgaaaaaataattttaaaatcttaaatcaattaaaattttaagaaatattttaagtaatttgattgttttttacctaccatgtttacgattttcggtatgtaaataatttatttttaactgttttcccaggttttcttgaattggccgaatatgtcatgtattaatacactccaaagattttggatgattagactttagtggaatccaaccaaagcggcaaaacaaagaacatgaacatttatgcagttaacaaggaccagaatctaagggaaaatgtttcacatgtcacgcttaattttccatcaataatggtgaactttccatatctttttaccaacaagtctctatattattgtcaagtcttcaacttttaaacttttaaccatgtgttattctgtgtacatgtagaagttgtttgtacacaacacttaacgtggatagattaatcgatacaaaaattaactagttcagtattttctaaaaatgtcaactagtaatatttatacactcagtagtcagtatgataagagtaagatattcgtatagtaattaagttatcaaaagcaacgagattaaagtgaaaatttgtatgtaaaaggaatttggataacagagatagatatataagagaatccgccgcacacaaatcccgttgacatgcttgtgataaaacaaagtttaatatataattaacatcagaaaactctggttgagtttgattagtgtttatatttatattaaacaacaacttaatggaatatgaaattataataaaatacaaaagaaggtggaaaaacatgctgtttctctaaggtcaaatgttttgggagaaagagaaatgcgtataaggagggaccatgccggccgcatgtggctcttcattgctcattctcttcttcttttaatactaatatgatacatatctcttagttctttttgtaataacacaaacgtccttttaagaatagaatatagaataatctaaaagggttaaactttccaagagtcctaatcatcatctactgatttaatgagatgacaatactaaaacttgcaaaaacaatagagagaattttggtttgaactttttaatgtgacattgtaggaagaataaaattatatatatatatgagttaaaagccaaactgatgaaacataaaatgaaaatagaattggaaaaggtctagatggcatagttatatgttaatattccatctgtttctttttaattgattttctagaaaaaacacacatagattaagaaaacatattaaaactgattataaatatattaatttttgtgatttacatttttctatagttctaaaccaataatattcaattatttgtcttaagtttaaaattcatcaataagaacgaataaatggtgcatagaaaacctataaattcaatctttttgaaacaatttattttctcttaaaaatcaattaataaagaacatagagagtatacaattagaaaataattcattgaaaacatagcattttttttctacattgcctgcctcattatgtttatttgtttagggctccaaatatatagcatgagaatggtcgtctgtcggaaattgactgtttaaatttcttgtaggttcgaacgtaacctctaattaaattaccaacacgttaatatatctatgcatcagtttttggaggcaatattgcttctttagcctccgttgctttatctccgacgtacttagacgttttgtttctcatatccatagccgtatcttttacgtcaccggctttttcaacgataaaatctttggctttgtccgtccttgaagtagtttcttccttcacctctttgcctttctcggtcacaaaatccgaagctctctttgcattttcagccaccgagtccatcgcttcaccagctttcccaaaaatgtagtcttttgctctctccatctgattttgaagctcttgtcccttttgagcagacacgtttcccacttcacttcccttctctttcacgtaccccgaagctttctctctattatttgtgtgtttgtgtgacaattacacaaaattattacaatgaattcaaaatgggtatttagtaaaactttaatctcatatacaattgtgtaaacaacttcatcttaagcttataaaagaaggaatattacatcctttagtgtttagtttcaaaaccaaatttatgagttatatttcataagtataccaaaacaatctcatgaaaacaagtttaaattttcttagaagtgatgcggaacctattactaaaccatagtgtatcaaatttctatactaaaaatcacgtaaaaactaaatcatatcatcgtttatgaattgtttatcatcttagagtatatgttaaaagttttattcgaccgatgtctatgtagatctcaagtatgtccaaacaaaaagacttacgaggcatcatcaagccatttggggtcgttcggtgagttaccagcacctttcacggcggctgagacccatgacttcttgcgctgaggtgcaatgatcacattcttccggccaactttcatagctccaccgccaacgccgcttctcttgcctccactgatcaagaacgaaggacccaacccactaagcacagctccggagatcgacatctctctaagatgtttaaatgtgtgtttttgggagtaagcagaatcaaaaggaaagagtttagtttgttagaggaaccaagtgagtctttaatttataaggaacctcagaggctgacgtaaattagtttctaaccaatgagaatcttttgttagttcgtagctcgccacgtgtactcgcttttacaagaaacacgtccgctaacaacttgcaagagaaatttatttaagttgtcatgcttggaagaaaacactgatcatttaagaactagtatgcgatttcaacatgtagcctaaagtgagaatctttataagtacaaagtgacatgtttaaagcaaattgaaccaaaaggaggagtttaatttgtaagaaggacaaagtgagaatctttgaaagtacctcagaggctgacgtggattaatttgtttataattacaaccaatgacatcactttgtttagttaaaattcagaggtttgacatgcttgcaagaataaacaactaagactataaaacaactttgtgtgattaagtttgataaaagggtcatgccggtcacatgttactcctaataccttcctctatggattataagaagttaaaaataaacaaaactaaaaaaaataagaagataacaaagaatggtgttcgtatgtttgggatataggtgaaagagaattgcgtagaagaaggggccatgccggtcgcatgtttctgtatggttaaaatctgaacgtagttactaatgttgctggcttatcatctttttggggtcttaaaaaccaatgtagttccaataaaggtgtacaaaagcaagttattttcccgttcttgtctttttcacgatttttatttgttttcggattctcaagattgttattaatgatcttgacaccgtgaccttcattgcttaagtttatgtcgatgtactaaattatgagtgattttgcctccatgttttaattcttttttttttaaatgagacccgattatatagtttgaatatcttgcaaaacctaatcaaatgatacttacatttttatattaaataaaaagatatacaaaagaaaagagtatcaatgcaaatatttaaccaaaacaaatatattttttaaaatgagattggataaatctaaggctatgaacgtattttgtttttctaacttgtaaatatcattagaaaatgaataatataatggtagagtaatcttggtaaaaataactaaaacaagactacaatgttaatgaatccaaagaagcataagccttctctatcttttcttgtactttttaccggatatggtgttacggatctctcgatcaaataatattcttgaagattgttttaaaagtgaccttttggttgttgtggagaacattgttcctctgttgccatatgtgaaaaataggcttgtacaacaactttcttgagtgttgtgggtgcttgtggactcatatttcgagtccatgagagagcagttatgaccaggctataaatgtttgatcagatataaacccaaggtatttaatgtatgttgatttgataagatttttgggttttattttttgaaaccttattggatcacccagtcatgtgtctctaaagtaatgggatccccaatactcactttacacaagttcttgtctgcattgaaacaacgtcgctagggttttacgtttccccttctctgatgaaagtatgggatctctaaatttgttaacacatgtctccaattggtgtttttgctgattttgagacaaatctcttgtggtcagcttaataaaaatatatattttggttatctttttcaatcctataaatctattgcatggtaatatcaggattattctggacaaaactaactactgaagcaacatactcaagaaatttcgttattggcccactattctttcttagtttttgttttcatatatatcccacctatatttcagataagcatcaaatctcaacaactttggaacccaccgagtactaaagagtaacaatacacttcaataatctccagaattttggtgtcgaccaaatttgaccaaacgcgttgattaagatgtaaatatcatgaatattatgttttaagaatgatctaggaaaatcagaattccattagttagtaaaacatttaacgaaaaccgtggtccgatggtccaactataagggattacgtgaaagtgacaaaaagatctttaaattaaagatacacatctgttcgattgatcgattcacatcagctttatgtccagaaaacctaaataaaaataaaatataaaatatataaagttcagatcattggccgcttctacttggctatgaattggactaataataacaaaagaatttgtattcaaaatttaacttcaattttcttacaaacaatgagcatgtgtcctcgtaatgtaatcgtgtgactgaaagatagaaataaaacagaataaactgtaaagggtttaaggctagcaaactctgtcgccaaaataatcagatggcatgccatatacatattttaattaattatataatcttagttcttaaatattagttatgtattaaaaatgtgattcctttcctacaattaaaatttataatgttttaagaaaattatttaacttttgttataatgtttaatagtgtatatagttgaatcgtcaatatccatccaaaccactataataattgttgaccacatctagctggaccatttatattattcccattaacttgtttataaagtaagatgatatgatggatgtataatccatgaatcttctccaggcgtggccccaaaaaatcagccaaacaaacatgttttccacgaatcttcaataaaatagaccaaacatttcgttagctttaactttaagtaattacttacaatattttctaatagccacgccggataatattgtcgttgctatttgctaaactaaaaaattcttcttagaaccggtctccaatttttttttttttttttttaataaaaccgttaactatgcaaaacgttgataatataataaagtaactttttataatgaatatttgggaatgaaaagaaaaaaaaaatcactcgaaagcaagtgaacccaacctttgttttctccttgccaaattatgaaccctaaattttcaaacttatagagtgattgtttttacggttcaatcgcgcgttttatatttttcagtttttttgagtagtgtttaagttggttgttggtctaactcgtggtacgagttttcgatttctataatttctagttccttttttatttctaacttcatatgtttttctcttagagcttactctcaggagaactatcgactttgttttattttctaaaaagaaaaataaaataaaataactttaaatcaaaatatatagccatagatgtatggtacaagtcatcatcctgactagatgctgattctatcgacacgtaagatttttgtctgaatgatctcaataatagaagaactttcaaacatgattatgttcgttcactattaattcaatttttttgaaaataatttttgtcctaacacttctttattttttaaatatcattaggatagagtatttgagtcgactaatctagacccataatccaaaatattcatatagatgaaccgttaaccatttgacgaataaacttcctcaatagatttcataaacacctaaaaagacaaacaagcaaaaactaaactttttaaaatcagctaagacactcaaaaagcattgataactaattaactatgatatttcgactaaaacgaatattagcaattgtcaggcccattaagacttttaaagcccacaagataatttctaacttatattttttttttggttctaatgttcttatatttacgtaactgattagtacacaaattattttagcgaaaattgactcaactaagttcataaaaagaagaaacatggaatttcaaagctaagaatacaacataacatttctcaagaatgactcgtttgagtcctaatttattttcggatgacaaaagaaaaaaaacacaacacaaccttattgaaatatcaaaccggagtctcctagtctatagtcaataatctcatcaaaggttttcgccatttgtggcgtaagatgattcttccaatcaccaacttcacctttcctaaagaacacctgagaatctacaccaattctcgttgtcccattcttattaacctccaaattgcttaaatttcgtaaactacacaacttcaagatctcctccaccgatccactttcttcttcttccttggtgaatggacattccaagaactcggcgagtctcttgacttgaacacgaggctcctcaattatctcttcgtacttcatgaaaagaacattctcctttgcttccaagctccctttccaatagctcaatacatgttcccaataaggtccatataagagaactcctctacaataagcatcaaacatgagctcaaaagtggcttgatccatcttggtgcgatgcaacatgtttctataatgccagccggagacaaacgtatctttgatacctctacacacatatacggttttgcaagcttttgtggtggcttcacgcaatgcttgtaagtgcatgtgtgtagaaaagatcataggagaagaatactttgcgagatccggaatttggctattagcgtataactcaacctcaagaaatgggacaaggtcatgagggttttgtaagagcaaaggatgtgtttgaggggttccgcggtacttttctctatgtacaacagcgaaaattagggatttgagccaagtggttccacctttgggcaaagaagcgaggattatatcagtatctcgtggcttgaagtgtttttggacgtcaagaacggcttggagtgtgtttggatagtaccaacaacctttgtagttgtagagaccataacccatgaaatctttgtctgaaggtagagaagtgatcaagttcttggtttcttgactaacgttgtcgtctttcatgtagtttggaaggtgatgagcttctttagaagcctccattgtgataatttgttcccacgatttgaaacacaaagagaggatagtgaaaaaggtgaacataaaagagtttttatttacttatttgatgctttgaacaatttgaccttacaagcagatggttatatttcatagacaaagtgtttagggatttgttttaatcatgcgtggatcttaagccacacatttcctatattacgataagaaatcttatcttgaaaaaaaaaaaatacttgatagattttgactctttggaattgtagtttagtcgtgtactagtgtctagtggctagtgcatgtgcggtgtcataaatttaaatctaaatgtgatagtgagcgacaaaattttgtttctttctaaaagataatagtatgattcaagaaaacacaaacataatttatttcattttattcataaacacaaacacaaacataacagcagaaaaatatataaaacaagaaataacataattgaagcaaaacaagaacatgagaacaagtttcaaagattgattcaagaagaaaatttaagaccagaacctttaaacttctcttcaatggttctatcaatttcctctgccaatgactcactcaaagtatctctccatcctccaatctctccttttctaaagaaagttttagtctctattccatttggcaatttcccttctttgttaacttccaaattacttaaactctcaaagctacacaacttcacaatctctctcacttcttcttcttcaataaagccacattccaagaactccgcgatccgcttcatctcaacttcggtctgcttctttagctcctcgtaagtaacaaacaagaccttgttcggattctcgcggcttgcataccagtactccaatatatgatcccaaaagggtccacctataaacttcccttcacaaaacgcttcaaccgctttttcgataggataatccgcggtttcctcaggagctagctttttcccaaaatgccataaggacacaaacatgtccttagggttcctacaacaatacacaatcttacaagacgagctcttaacagactcggggagcgaaagatgcgatatgtgcgtgttcatcagtcttggagaaggcaaactggagaaatcgaaatctggggactcgtagtaaactccttccaagaagggcacaagaaggtgtggattggtgaccagaagaggatggttaccagaagaagaaactggaaacttgtgtcggttaaggagagcaaagacaagagcttttaaccaagtggtacctgatttaggattagtgacgaggataatgtcggaatctttagcttcaaagcgtttttggcagatcaagattccttgtaaaatagcttgtgtgtgccaaagtccttggaattcatatatttcactcactaaccaacctttctctttaggaagagaagagatcagagctcttgtttcttgtgtcagatcttcatctcccaagtaagcaggaactgatgatgatgatgacattgttgagacttgagagatcgatcaatcttgaaagtatgagatcttttgcttaagctctctatgtatctatgatgctaatgcttgtctgcttttatatatgaatgagaaggttgttctacaagtaaatttcacaatgcttttgcttctaagatattagtttgggtggtgaaatggtcaacacatcctttacttgaagagcacgtagaatataatatttaaagataacaaaacaagaaagaaggagaatcacgactcttatgtctaaaactcaaaaacaatagttttatttctcaacagaccagtttggtgactttggtccatcacaacaagtcaacaaccttacttgtattaagccaataaaaagaagaaaaaaaaaagctcaagaaattgagaactaagttggtaaagcagattcttagcaaaagaatctaaaatcagaaccaattagtttctccttagtggttttatcaatttcctctgctaacaaaggagttaaagtatctctccatccaccaatctctcctttcctaaaaaatgccttagtctccattccattcagtaacttacccttctcattaacctccaatttactcagattctcaagactacacagctttatgatatcttccaatactccattctctatctcttcttctgtaaaagaatatcccaagaactcggcgatccgcatcacccactcctgaggctgctctctcatctcttcatacattacaaacataacctttttcgggttttctcggctttctttccaatactgtaatacatgatcccaaaagggtccgtatatactagaccctcggcaaaaaaacctcaccatttcctccattgtgcatccaaccatctccttaacaatcaaatttttcatgaaatgccaaagtgagacaaacgcgtccttcgggttcctgcagcaatacacaactttacaggacgagtccttaactgactcagggagtgaccctacaggaatgtgtgtagagaagatcctaggagaagtatcttgagtgtgaaggtggaaaccttcgataaaggtcacgagggtatgcgggttgttatcgagcagaggatgggatactagaggggtttggaattcttgcctatgaatcaaagcaaagacaagtgatttcaaccaagttgtacctgacttaggaatgcttgcaaggacgatgtctgaatctctggcctgaaaatgcttctggctatatagaacaccttctaaaagatttggtggataccaaaatccctggtattgatagagatactctgcaaaaacgcttctgtctctcggaagagaagacagcaactcctcgcattcttggactaactcagattctaccaataacttcgaaagagtggtttcggattttgtcatagtgatatgagccaaagcttttgctcttgcttttgtaaatggaccctctgttatctcagtaatgattgaattgcaaagaagtgctcaagcttaaagaacaaagagatttaaagcaagcttcctcttaacccaagtctctcttagaggctaattgttggaagttgtgttttcattagcataaaaatcctttatataagccatgaaatcttaaaaataaaaaggaaaaacatcaaaacccaataatcatatcacacagattgtactattgtggtattgcttgcacataactctatatataactagattatgaacatcttaaaatgtgagatttttctctatttttatcactttctttacaaaagaaagatttatgatttcaaaataaaactctatctatgaatgatagatataaatttataaaaaatgtcaaaatcctatataaaagtaccaaatgtcgaactataataagatgcattatatgtagctgcataaaagataagagtatctatatatgtttcctcattaagcacaaacaaacagcaagaaccaaaaaatgtactttctggattacgaaagatctagaaaaagtgaagaagggccaaaattattaacttgaataataaagtaattgctagattctattataaattagcttccattcaacaaaagaaaagttttacatctagttctaaccatttgtttcttaaaagtcttgcagcatacagatttaaagttcctcagaagtaagaagtggctaaaattctctgaagataagtccatactaaaacgatcctacttgtcgcaaacacaccaaccttaacaagaactttaaaatgtgtccgagagacggaaaagaccactcacttttaatcattcgacatcagcagctcccaataggtatgatgttggtgcattatctccaagcagtggaatatactctaatcctctcacgtgaacgctaaagcaagctaataaacaaacaaacaaaaaagagttacaaaaacgtattggttggtatctaatagtgtgcggatatgagatttgtgcataccgttctctattttgatcacactttgaagcatcacttccatcttggatttcatgtcataactgtcatccatctttggcacaactagcattagttccctatgaatctgtcgaacaaactgacaaatcctctgcgcgaattcgatttcaccgtctgatatgcgaccaattgccatccgcattagctctcccgtcaaatctgcaagctgtgcaagtaacaaacaataatcaaacataattcagaactccaaacaatagagaacatctttgacagtaagtattaaccataaataaagatggtctaaaaaataccccaagaatatagtcgaggatattgatctgcaacggctctaaagaagggtcactaagtggtacaagcgttgtgttaatctcatcgagagtacatagcgtcccagacaaacagaacttataaaacgttgcagcttcaacatattcctgcacctgtaagttacacaaaaccacaaaacatatcagttaaaccattaaccaaaatcgtaccaaaagatgaatgattttccgtttcacaaacccctggggaataagcacgtctcagcttccaaaaatcagtcccttgaagctctttcattagccgggcaaaatgttgatccctcactgcttctaaatccttccctgctttctccaatacctcctctttgttgtctttactgagcctgccatataacaacatagtaaacaaaacaaacaaacagtatcttgatgaagaacacaacaaaaacacacaaaatcttgatgaacacaaacaaaaacaacagaggtgttgaaattacctgtgaacctgaaagataacttttttgctgttcattgtgatatcacgacttaccttcaccactctttctcgcttctcattctacaaagaaacaatcatagaaaccagataaagcctcctcctttattctcaattcgctatagaatctattacaaaacccaagttgcaacatgaaagatcatttctttagttgtctaaacctataaaccttacttaaaggactcaatcccatgacgcaaaggttcaatctttataaacaaacagataaacccaggagaaacaatggagcagaggaaacacttacgaagttattgagataatcagcgtaagtagagaaagcatctttcattgaggattcagtactcatcgtcctagctttcttaaccaaatgttcaacaccactctctgcaactacacaaacaccaaaaccatcgttactaatcaacactaaagaccacacaaagcaatagatatatgtagaagtgagtgtgtatacatactttgatggagtctctgaggttttaatttgggagccataagcataaaggctactctttggaacgccgatgaagaacaactcaacatctgtctgatttctccgatgctcactcgaagcccaaaggtttatttcgcgatgctttagtttgaaagttaaatattaaacgagagaataaggagacatcaggtgctgtggtgtagtggttatcacgtttgccttacacgcaaaaggtctccagttcgatcctgggcagcaccagttttttgtaattaggattgattgattcattttttctccacggttttgaatggtatttttaattaaggttaatttacagtatattgtttttttcttttcctaattttgaatgtgttctacaacctagcttattttatgtacaaaaagtgttcaataaagtgcataaatcaatttgagatgaccaacattcttgtaaactatgatggtagatgttagagaatattttgaactaattggatttgagtttaatactaatttgatttcataatgataaatgagcatttagtaattgttggttttacgtttaaatggtaattcctatatagatgattagttttgttccatgttcaaaatattgttagtcgttaattagacagccgatgggtcctaatgattactcggttaatcgaagaataatcgaaaattagttttaaaattattttatatatcttaggtttacatacaatttatgttataaaatgtcacataataaattatgagtcttataataattttatggatatcattttagaaaaaatgaaagctaagtctattaagcaaacatataactatatttggttgttcctcaaacttatacgtttttgttcacacaacatattatctatttgtttaccagccaaaatttattaaattttcatgagccaaaatttactcatcagtgtgactttgctgccaaatatttcataaaccaccgtgaaacaatgatttagaaaatgtaactctctagagaaaaaatatatgttttctttcttagtgatgaattgtgtaacctcgactgtcattcagataattttcttgttttttttgttttctctaagtttcagtttcaagtgtagtaactctcaaacgggcatgaatcaacaaacactttatattatgtcttccatttaaagtagtataatcatttggattatgaattgtttttcaacaatttatggatcatgactttttttgtcaataatttatggatcataactttgatgatatatgactgtttatatgtatctaggttacaaaattaaacaaatttacaatacttagtgttatcatatggattaatcagattatattattcattgtcattagatggatttttgaagattagtcagtcaaaagtatgcaaaatatcttagcatgatgcgagacaaattcaataggtgggttggtttaatttgattttcataaatgacaatggtattgttaaaaaaataaataacaggtgatccccaaaacttgtaatccataaaacatacatattatactttaatttattttacaaatgtttttttatatataactaacaaaacaataatatttgtgatgaccaactcataatcttattctatatatacttactgtaaaatatatactctttggcgtaataaattaagaaaacttaaaaattaaatatcaacaaattaaaatagaattttttttctctctcgcaatttactgctggttcaatcctagtttttagcggatgttattttaattactaagtttcgcgcacagaaaaaaaaagttatttatctactatacctcatttctaaactaaatcactatgcataaaaaaaaaactataagaagacatattcggctcataatttcagaaaaaaaaaacttgacattagttatgcatgtgatattatattatatactttctatgtgatatatacttttctttttcttaatatagataaaaaaactccaaaagtttttaaattgctaaattactctaaccaattatttgaaatgatatttttgttatttgtttttgattagtccttttaacatttaaattcccctatcacagaatcaagactcaaaaatcgacaaaattgatttgtacttatcaactcgattcaagactcaatttgatttaattttgtttgttacggttttttttttctgtagcaaattgctgagttaaattttagttttataattaccaaaacatagaaaaatcatatataatccggcgattcaattttttatcatcttttacaatttttccgaatactggtttttttttttaaccgcttaaaaaaaattagttacctcgtttaaacttgattaccaattgaactcagtaattgcttagcttgttgatcaaacaaaataaaatccttttaaacacctttccgaaagttaaaacctaaaagtttcaattcatgattttgaaaataagcggccgaaacattatacacttcctccacacgcacaacaatagactcaaagcaaacgcaactcatatccaatcgcttttaaacgccaataatcgcgttacagtaacaactcgaaaaatggtaacactaatcgtggccaccaccgccgatccagcgtcgatcaaccctgcggcggcgcttctcgccatgcccggttggaccgccggacctatcttaccgccggtaaagtttcaatcatcctccgccggtaaagtatcaacctttctctcgtctgattttgttcttgtcgaaattttcaggacataaagagttttagtaacaagcaaacgagagtgattcaacacgatagatctatagtaaaagaagacgatctcgatttacgttgggaagaagctaccggtgaagttgttgatgaagtcatcttcctcagccgtcacaccgccgtctcaaatcgtcctgctttaactgttcatccgattggtagtgcatcaaaatccaaacttttgattagggctttgttctttttacgattttctgaaagattcaaactttgtatttgggttttggttgttttatgttttcctgaaggatgttttggttgataagtgtaggagtgcttcatctaaaggatggagaatcaccgccgcaaggaggaaagcctggatgggcggcgttgccaagcactagaattggtccatggtttcgtcttttgaagaaaatggctgaagctcatggtttagttcctgagtttgaggtattttgctgtttactctctcttatgagttttgcttttgattggaattgaagtatggtttaaggtgagagagaatgtaaattgctttgtgtggatgcagataacattggaagctactcatcatggaccaataactaacaagccaacgatgtttttggagattggtgagtttctttctttgttccttttatctgaattgattagctctctgctcgctctcttgaaattgccatttcgttgtgtatccgagtttcttagttcatctccagtgtagtttttgaggaattgaatctatagtctgagaatgaataacgtgtgtgtaggtagtaccgaggaatactggaagaggcaagacgcagctcaagtcatggctcttgtaagtgtaaaaaagttagttaattgaaatggtttcaggaggtagaaaaaggtcgttgttcttgtatcttgttgtttcctgtggatttaaagacttctctagggttgaaagtttggttctaataatcatcatgcttaacaacaacttttgaggctcatgactggccagtaacttttagtctatatctctaagtttgcttccatttagtaaggagcatttgtgttttgtgattcagttaatgtgggaaggtcttgggctaggaggcagtgaagaagtagggaagtggaaaaggtatatccattggggcttaatcattacctcgacataaagaaaaaccgaagtatcgatctaaacttagtgtggattgtttttgggtggacagtgaaaccggaaagaggaaagttcttttaggcattggaggtggacattatgctcctcgtcacatggatatagctttgtaagttgtcaagaactctgctttgtgcaagcacaacattgaacacgttctttatctcattgttttgattctgcattcatcaggaaagatgatatttgggtaggccatttgctttctggatactcattaccgatggaagatccaactcaaaccaaaacaacgcctggagagaattacattggtggaaattggagacaatcaattaaggcagcatttgaagctactaaagcatcattccccggaggcgagatcttggctcatcttgaccacaagtaaactacttcattctgctcctgatactttcttgatactcgcattggattacgagtaacggggtttgtttttctgtatcacaggagcttcaaaggatggcaaaagaaggccattacagagtttttagcagaagagagcatcaatgttgggaagccaaacgatttcacatgaactgtgagagacccccttaaaacatatcttgagatctgagtttttggtttattggttcagaatctatcattgatgatgatgggtttagattattttcagctgttacaagtaagtagagattgaaattcatctgtaagctgccctttttaaagttcacattcagatttaagatagaagaagaataaaacatgaaaagacaaaacaggagaaatgtagaacaaaacagaagttgagttttgtttttgtctctttacacagtttacttagctaaattattgaaaatttagaccaagggatacagtaacatttttgaccaagtaagtccactgatcaatatcaattatgaattggtcattttcgcactattgttagtgctttttcttttgaagttgagagggggagaaattatgatttggggatgtgaaaaaatcatataaagaaccacttcggtactttgtttgtggttcaatagtatgatcatgatatcatatacagtttttcttatgatctatattttgaactatatgtttgaatttgaaataataacttataaatcatccattccaaagaacaacttatgtgacattccggttagttagaaaactaaaccacgtagagaacctggagacttgtaaataacgtgacttctgcgcaagaaaaaagaagaaagaaagaacaaaatacatgacattatctaatgcatgcactgatgcacctattaaataacatttgtcatgtgttattttattgattttcaaaaccttccccgacttaaattttagacaatgttttcatagatcaaagtgtgagaaagaatcatatattgtagtctttgaataggaaagagttttgtcctcttttcgattgtgtagttgtgagaactaggactcttttggtttacactaatggtttgcgcagccttgaatctagtgttcttgtgttagcactataggtttgagtagatgacaaaccaaaaaaaaacaaatttcacacaagcaatggaaccacgagaagaaccttaagaaatcaacttagtttaagaaatcaacttgtcttaaactaagaaaatgttggcaatatacatcaaagatataattatagctatactaagactaaaacgtaggaccaacgtagccaacgaaacatagccgtcgattagtaaggaacagttaataaactcgctggcacacgcagagatcgtacggtactcattacctttggactatattaatactatacacctccacgtacccaataatatttttgcataacacgacgaagtaagctttctatatatttttcattagtttagcagctgcacaggtaatatttggttaacacgtgtcacttaaaccgtggttgtttttaccttcgagaatcatccccgatccctaaacaatggttaactaaaataatacacgattatcgagtgtaacacgacgtaccgtaacaaagatataatctacagcctcggttttatcatgcataaaagttaagaactcatatttacaaaactaattcttgttaatgttagcttaatctatagttttattagtatgctttttttttattttccttcaaacacattttttattaaattattataaatatattatcggttaaagagagtcattcaaaaaccgacgtgtttacatgagaaaaaaaacattttaaaatttatcttttctgactaaaataactgccagactattaaagttttgaaaaaaaattatactattaagcaaaggaaaaaaaacaatgaaagacctaaacgaggcaatttccataacaaaaattggccattctttttgattgtcgagaagagatatcaaatcaaaacaatgaaagttttattagtatgttattagcaaaatttgatagcctttcacatactttatttttttactatatcaaatatattcatatcaagtaatcatcataacaaatatgtgtcaaatgagaaatttatgaaactaaaagataggtgtgacttagaactcacgtctatatcattttcatggatactatatgaaccactaactactttaaataaattaaagtaaacaaacaaaaatcacaaattgtacaacaaataaaactcataatactatatttccaaactaaattaataaataataaaattaggaatttcatagtactttataaaataaaataaaaacactacttgaagtttttttctaaaaaaatggagaagaagagacaaaataatataaaccgcttcgctgaaattctttttggcagatagttgactttttatttgttttctttatacaaaaacccaaatctccattttattttattagaatcatctccaaaaataaaaagtcaaatccatgagagaaaaatactctctctggagaagaagaagcaccgtttcatagatccgattttctccaaagctctcaccttttgactcgcctctttacataacaaaaaaatcccatctttcacaaaaaaaaaaaagttctcatctttctacttttagttcatacactccatagattgataaagagatgacctcatgattatgaagagagtttcagatattcccaggaaagtgaagagattttagagttattggtaagtgaaagttttaatctttttaattgggtaagtaagatcaaagtttctgtatttgggtttatagtttctgtaattaaaaggtgtgcattaaatgttgttttccatggctgaggaatttgtattattatgaagtggtttggtttggtagattaaatgagaaaaccaaaggagagagcatttaaagaagaaagagattttggttatctctttgtctctctgtgttcatatttattgcagagatagtgattttttaaattgacctttgaacatcccttttacatgttttcgagatttgtttttcttattaaacagccaaaaagtatctggcttttttctcctctctcaaagttttgatttttaagtgatttagggttttttcatcccctggaggaagaagtttgagtctttgtatctactttgatcaagtaaggtttgttacttcactgttctatgagaagattcttcttaaagtcttgaccttttgattcatttggattctacttattagatctgtttatattctccatagtcttgtttctattagtttatttgttggtggtactagatccaattttgtgtttttaacctttatttttctgttgtagattcttctttctctgcaaattccaattgtttattgatgttcttatccaaaattttttatttgatagaaaaaaaatgattgatttgattgcattgcagctttgtgagaaaagaagtttaaagctttttttcttttttgtcttctttcttatgacagtgagctaaagattcttcattctttgcttaagagataaaaactttgctacatttgtgtaaccatgattgcaaatttgctaacaaatgattcttacaattgttacaagtaatctagattaagccatgtttttgcaattttttcttgcgtattgttatggtattacagcttttatctaaatgtctttttctttaaattagtaaaaagttggaaagtggtcattgtagtggttgattgcatctttttgctcatgatgatttgtttttggacttgagaaaataaagaatcttttcgttcacatgtgtgactgaccataagttaagttatgtatcctttagaatattttgtgccttaaggtttgtttctgtcacaatcttcctggcccattgcttcgttgaacaactcttcatatggaggttgcttctgtatctaactttgagatttgctgatagatagattgattctatcctctagatagaagtttgcttatacttgtcttcttattcttgttatctgtttctttcttatgagtcctgcttgaaactgtttgatagagattgtctctttgatgtgtagattgttggtcgcgactggtgcttgaagatatagctttggttctttatgcaaggtttactctcttagaagaatgagagcaggtataaagtcttaagcttttgaacattttgcttttgctttgatggtctttgaattgttatgggaatcagtagttcaagtggttctttccgtttttcagataatgatcacgcgcttggtaactcgatagagatttgtaaagatgaatctaagccgcatcaatgtcttgatgagaattgggaagatgcagagctaaaggtcccggaaaatgggaagaacaacaacaatgtgtgtgagttgttctatgatacaagaagtggtgaagaatgggagaatgaggccggaaagaaagttcgagatactagtcatgattgtgatgctaatgtggattctcctgagaaaaaggatccggttttctatatggacaagaatgttacggcctgtgatttacctgagattgttgtttgttacaaggagaatacttaccatatcgtcaaagatatatgtgtcgatgaaggtgtgcctgttcaggagaagttcttatttggtgagaaggattctgtcaagtctagctcaacagaggatttgatgaaagcagacaaaacaaatgtgaatccatcagaaactaagtctgcggaagacagcatcagtaaggttgatgattctgagttttgtaacgatcataagacagacagagatgttgaagaatcttcaggagaagattttgctgatgctgaaggtacttctagcaattacaatcaagagcatttgattgtgacagaggaagtcaaggcttcaccaacacatgggctaagtccctctgaaattgaacctgatgagaattcaaaggacgaagtggctatatcacaggataatgactcaaaggaatgtttaacattgggagatattctatcaagggaagatgaacaaaaatctctcaaccaagacaacattagcagcgatagtcatgaagaacaatctccttctcagcttcaggcaatacataacactatcaaatgacgtttcaggtttttctaaattgaaagtttctaactttctaatgtgtgactgcaggataaggaaaaaagaagcttagaaaccacagctatcgaaacagagcttgagaaaacagaggagccaaaacaaggagaggagaagctttcctctgtttctacaacgacctctcaagaaccaaacaaaacttgcaacgaacctgaaaagcctgaaactgagaatcatcatcagcaaaactgtttagtggaaaactcttacgaagacgataaattttcttcaagcagatttggagagacgagtttctctgcagcagattcagtttcaatatcaggtcatataacatactcaggaccaattgcatactctggaagcctctctgttcgatcagatgcaagcacaacgagtggaagatcctttgctttcccaatgtattgctttggttcttcatctcatcactttgtgagacttaaaagattgtgagactttttactgaattttgatgattctatgctgcagattgcaatcagaatggaacagtagtcctgtaagaatggcgaaagctgataaaagaagacaaaaaggaggatggagacacactcttctctgctgtagattctcttgatgtctctcctccacaatttagtcctaaagctattcactttgaagcacagaagaagaagaagaagaagaggaaagatttatgaaattttataatattttcttaaaatgagagtgctttttttttttattactgaaggtaaatatttttttctctcttttgggtgatgagtggtttatagttatgccttggtgtgtaataggcattttggtagttttacagtttaggtcttttgagtttggaaccgatgagttatattataaattttttaatgaagggctctttggatttagcattggttcatgaactctcgccattacggatctcttgccttgctcaagagcaagcaatccctgaaaccatcttcaagattctttctcagcttgtgaattgcttttgtgcacggagctacatagtatgtctcgcagagcatagagagtttgcgaaagcggttttcgtgttcaagaggttgtccgatgcctttggatggattgagatgagtttgtgattcactcatggttgtgttgcacatgatttaaatggttgtggagaagaagatgcttcaaaatagttgaagaaatcgatattggcgacaaagattggcttatgaagcaatcatccaaatatttcacatatccaaaagtaaaaaaattcacgtatacaaatcaaaattccaaacaaaaatataatagccagaaaatgtcaacacatatagcaacgtaagctagaccagaaactgttgagcttacattcaaaacaaaacttggacaacaaaagattaaaggtctactgagagaaacacaagagaagcaaataaaagatttgggatcaaactgaaaccttgttgagtatcggagaaacgaagttattcagcagccatgtcgtcctcgtcatcatcgtcttcttcctcaaagcttaggtcaaggtcagcaagcaactcttcaattggaacagatggtgcaccttctccatctgtcattgaagcagtctcagaagcttgataatccttgtccctgtacaaagatatgttgaaccttagctcagggttttcttcaagatccctcaaaaactcttcgtattctttgtctgtcttctctggatcaaccctgcctcttgaatcatccatttccattggaagcgacttgagtttccagttacgggatttcttctgcttcctctctctctgctcctcgtaacatttcttgatcagaattgcttcaggaagcccattcttcacactcagacggtatttctccatttcattgtcgttcacattagctccgtagatgtcataacccaaagcttgatccccaggtttcagaatgtgtccaagatgagtttggacataaaacatcttaccaatgtctgattcacgggcaatctggacataggaaagagcgtacttttgcccaccaacagtcgcttcaccaacaggtggctcaacatcaaacacaaagtacttgacaagttgtctactggtgagcgcagatcggaacccagacctccagtactgtctcgcatccaagaaggcacaccttagagttctcggatcaagtagagtgatattatcagagacttttgtgcaaaccacaagtggaccaaggttccccaagccgctagcaactttagaaggcaagcaaacaagatcctcacggcaaacaggacagatcttaacagagtaagtgtacttatagttgtacaaactgcttttcacatcatgagacaccagctgttggtcctgacggtattcaatggggacaactttcctcagaaactccacaaagctattagcatgacttttattcccaaagaagaaatcaatcccctgatccacctgctggattctaatggcacgtgaagcagcatcgtgcctaagaatcaactgttcgagataaaagaaagtcctcctatgcgaaacatgctgcctaagctgaatagaagcaacccactgatcaggattagcctgaaacctcgaacacgactcgcacagattatccctaaccgtatactcaacaggataagactgttcaagaacagcaccattaagaacctcagcttgaacagtcaacttaaccttaatcctcttggaatgaggctcagtccaaacgaattc

SEQ ID NO: 161 - DNA, 35137 bp, Arabidopsis thaliana
ggagagagcatttaaagaagaaagagattttggttatctctttgtctctctgtgttcatatttattgcagagatagtgattttttaaattgacctttgaacatcccttttacatgttttcgagatttgtttttcttattaaacagccaaaaagtatctggcttttttctcctctctcaaagttttgatttttaagtgatttagggttttttcatcccctggaggaagaagtttgagtctttgtatctactttgatcaagtaaggtttgttacttcactgttctatgagaagattcttcttaaagtcttgaccttttgattcatttggattctacttattagatctgtttatattctccatagtcttgtttctattagtttatttgttggtggtactagatccaattttgtgtttttaacctttatttttctgttgtagattcttctttctctgcaaattccaattgtttattgatgttcttatccaaaattttttatttgatagaaaaaaaatgattgatttgattgcattgcagctttgtgagaaaagaagtttaaagctttttttcttttttgtcttctttcttatgacagtgagctaaagattcttcattctttgcttaagagataaaaactttgctacatttgtgtaaccatgattgcaaatttgctaacaaatgattcttacaattgttacaagtaatctagattaagccatgtttttgcaattttttcttgcgtattgttatggtattacagcttttatctaaatgtctttttctttaaattagtaaaaagttggaaagtggtcattgtagtggttgattgcatctttttgctcatgatgatttgtttttggacttgagaaaataaagaatcttttcgttcacatgtgtgactgaccataagttaagttatgtatcctttagaatattttgtgccttaaggtttgtttctgtcacaatcttcctggcccattgcttcgttgaacaactcttcatatggaggttgcttctgtatctaactttgagatttgctgatagatagattgattctatcctctagatagaagtttgcttatacttgtcttcttattcttgttatctgtttctttcttatgagtcctgcttgaaactgtttgatagagattgtctctttgatgtgtagattgttggtcgcgactggtgcttgaagatatagctttggttctttatgcaaggtttactctcttagaagaatgagagcaggtataaagtcttaagcttttgaacattttgcttttgctttgatggtctttgaattgttatgggaatcagtagttcaagtggttctttccgtttttcagataatgatcacgcgcttggtaactcgatagagatttgtaaagatgaatctaagccgcatcaatgtcttgatgagaattgggaagatgcagagctaaaggtcccggaaaatgggaagaacaacaacaatgtgtgtgagttgttctatgatacaagaagtggtgaagaatgggagaatgaggccggaaagaaagttcgagatactagtcatgattgtgatgctaatgtggattctcctgagaaaaaggatccggttttctatatggacaagaatgttacggcctgtgatttacctgagattgttgtttgttacaaggagaatacttaccatatcgtcaaagatatatgtgtcgatgaaggtgtgcctgttcaggagaagttcttatttggtgagaaggattctgtcaagtctagctcaacagaggatttgatgaaagcagacaaaacaaatgtgaatccatcagaaactaagtctgcggaagacagcatcagtaaggttgatgattctgagttttgtaacgatcataagacagacagagatgttgaagaatcttcaggagaagattttgctgatgctgaaggtacttctagcaattacaatcaagagcatttgattgtgacagaggaagtcaaggcttcaccaacacatgggctaagtccctctgaaattgaacctgatgagaattcaaaggacgaagtggctatatcacaggataatgactcaaaggaatgtttaacattgggagatattctatcaagggaagatgaacaaaaatctctcaaccaagacaacattagcagcgatagtcatgaagaacaatctccttctcagcttcaggcaatacataacactatcaaatgacgtttcaggtttttctaaattgaaagtttctaactttctaatgtgtgactgcaggataaggaaaaaagaagcttagaaaccacagctatcgaaacagagcttgagaaaacagaggagccaaaacaaggagaggagaagctttcctctgtttctacaacgacctctcaagaaccaaacaaaacttgcaacgaacctgaaaagcctgaaactgagaatcatcatcagcaaaactgtttagtggaaaactcttacgaagacgataaattttcttcaagcagatttggagagacgagtttctctgcagcagattcagtttcaatatcaggtcatataacatactcaggaccaattgcatactctggaagcctctctgttcgatcagatgcaagcacaacgagtggaagatcctttgctttcccaatgtattgctttggttcttcatctcatcactttgtgagacttaaaagattgtgagactttttactgaattttgatgattctatgctgcagattgcaatcagaatggaacagtagtcctgtaagaatggcgaaagctgataaaagaagacaaaaaggaggatggagacacactcttctctgctgtagattctcttgatgtctctcctccacaatttagtcctaaagctattcactttgaagcacagaagaagaagaagaagaagaggaaagatttatgaaattttataatattttcttaaaatgagagtgctttttttttttattactgaaggtaaatatttttttctctcttttgggtgatgagtggtttatagttatgccttggtgtgtaataggcattttggtagttttacagtttaggtcttttgagtttggaaccgatgagttatattataaattttttaatgaagggctctttggatttagcattggttcatgaactctcgccattacggatctcttgccttgctcaagagcaagcaatccctgaaaccatcttcaagattctttctcagcttgtgaattgcttttgtgcacggagctacatagtatgtctcgcagagcatagagagtttgcgaaagcggttttcgtgttcaagaggttgtccgatgcctttggatggattgagatgagtttgtgattcactcatggttgtgttgcacatgatttaaatggttgtggagaagaagatgcttcaaaatagttgaagaaatcgatattggcgacaaagattggcttatgaagcaatcatccaaatatttcacatatccaaaagtaaaaaaattcacgtatacaaatcaaaattccaaacaaaaatataatagccagaaaatgtcaacacatatagcaacgtaagctagaccagaaactgttgagcttacattcaaaacaaaacttggacaacaaaagattaaaggtctactgagagaaacacaagagaagcaaataaaagatttgggatcaaactgaaaccttgttgagtatcggagaaacgaagttattcagcagccatgtcgtcctcgtcatcatcgtcttcttcctcaaagcttaggtcaaggtcagcaagcaactcttcaattggaacagatggtgcaccttctccatctgtcattgaagcagtctcagaagcttgataatccttgtccctgtacaaagatatgttgaaccttagctcagggttttcttcaagatccctcaaaaactcttcgtattctttgtctgtcttctctggatcaaccctgcctcttgaatcatccatttccattggaagcgacttgagtttccagttacgggatttcttctgcttcctctctctctgctcctcgtaacatttcttgatcagaattgcttcaggaagcccattcttcacactcagacggtatttctccatttcattgtcgttcacattagctccgtagatgtcataacccaaagcttgatccccaggtttcagaatgtgtccaagatgagtttggacataaaacatcttaccaatgtctgattcacgggcaatctggacataggaaagagcgtacttttgcccaccaacagtcgcttcaccaacaggtggctcaacatcaaacacaaagtacttgacaagttgtctactggtgagcgcagatcggaacccagacctccagtactgtctcgcatccaagaaggcacaccttagagttctcggatcaagtagagtgatattatcagagacttttgtgcaaaccacaagtggaccaaggttccccaagccgctagcaactttagaaggcaagcaaacaagatcctcacggcaaacaggacagatcttaacagagtaagtgtacttatagttgtacaaactgcttttcacatcatgagacaccagctgttggtcctgacggtattcaatggggacaactttcctcagaaactccacaaagctattagcatgacttttattcccaaagaagaaatcaatcccctgatccacctgctggattctaatggcacgtgaagcagcatcgtgcctaagaatcaactgttcgagataaaagaaagtcctcctatgcgaaacatgctgcctaagctgaatagaagcaacccactgatcaggattagcctgaaacctcgaacacgactcgcacagattatccctaaccgtatactcaacaggataagactgttcaagaacagcaccattaagaacctcagcttgaacagtcaacttaaccttaatcctcttggaatgaggctcagtccaaacgaattcagcgttcttcagcttaaccttattgagattcttcaacctcttgatacaaaatgtcaaaagctctttagattcccattgacatttgatccaagtctttggtggctgtaagtaacaagtgcattcagggcaatagaagatctgaatactcttctgtaaaccttcggtgatatcgacttcggaacgaagacaattcacacacatgttggctgcgtttggtgccatgggaacaccacacttgcaacacaatacacttccaatggtttgttgaacgttaaacatgcctgattcatccattactgacatatctctgtaacacacaacaaaatcaaaagaatgaataatcaatacaagatcacaaatttgataacgcaacactaatttctagagatttgaatcggaaattagggttttcgacaccacggcgaacaacaaactcgatgaaacaaaattgattccgattaaaatcgagtttaaaactttctacgattgatacaaaaccttagagaacgaaggaatgagaatcgaagaagattgcttacctgagaaggattatatcggagtttgagaaagcgaaggcggcgtcgcggagcagagacggtgaaggtttttttttcgtaaaaccctaaaatgttagagaaatgatttgctgtaaatgtatataagaaaaaatagtattcaaaaagatctaaatccacgtgtcatgacagtaatagactaaattatgccgttaataaagattcttagcccctataaatatttctttttcttatcaacctctcaataactcaaaaatattatcaatctcgtactatttttattaattgtaaatttgttaaataaatggagattttttttaactacaagtctacaagcatgagtggtaatctaaaatggtacaattttttaataatacaaaaaaattaatggttatgaaataatacaaatatgtaaaaaaaaatgaagagaagcgaaataaaatataaccagaatgggagaaaaagtattatacatcgctttcaaagttaatatttttattttattatctgaagaagtgactcgaaatataataattgccgccgatgagatctgttctcttgtttcaattgttgttccatggtgttttgctctactgtgatgtcttttctcctgtccaagttgtagttctctaactttcctttgtcacttttttctggagccgtccaacttgactcgtccaccggagcctccagacccaccggatctgccagattcattgccaccaccacccatcacccatattcctccgagatctatagctgtcacttttttggtccttttacctccttctccgatgagtatcccagagattgaagatgtgcccaccacctccatgcctggctccgccttcttgcctatcttttccggcgatggcttgtttgctgctatgctcaccaatcgtgccgtcatgatttttgagctgggccaatgtttatggcttcctttgtacctcgagacccattatatttggaccatgagtcatgtcatggtaacgtttgctctttgcttctattacttttaccggttatctttgtgattttaacgagtcttctttgttactttcctacaatttggagagatttttctccttttttggagaaactttcctcatatatgagatgttcttcctcatatattgagagaccaattcttctttcctcctcttcgaaggagagacttttttcatcaatcctctcctttagggaaaatgtttctaaacgcttaaccctagtggcatcaagctttattgttgttcgtcagccttcgatggcagaagaactaccagcactctcgtctttatttgaagaccaagagtcgacgatcgtcttcaaaccgatcgcttatggaatcctctcgaaggagtttccggttatcatccatgatgttaatctactctcttattactttcatgtttccccttcctttatttttctattttaaactttcaacaagtgagttatgtggcaaagcttcaagttgttataatcgcaagttaacttaatatcagttgtttgacaaaaaaaaaactgtaaaacgataaaaacttggcatcggtaaaactttatctccttttaaaatgtcccagcgaagcaaactaaacaaaatttgctttaaaatctacttaaacattataacatagttctcaattcttaaatatgctaaagtctaaagactatgtatcgtaagctcacaacaatgtgtatgaaatacactagcaaatcacgatctagattaccaaactgtggaagaaaaaattccacactcacaaaaattaacaaaatttttaaaaacaaattccacactcattcatgaacatatatagttctaaactaatcgccagtgactagtaattgcgaccagcgagtgcgatcaacgaattgttctgttattcgtttgacagttgctactttgttagtttggtagtcactatgatttggtcgctccatccaacgactggtcgtttgatagttgttgatcgaagtcacagtcattagtctctaacgtgcctttaatataaggaatcttaaacttaataataaagaacacaaaactggactaatacaagatgccctaaggagcaacattaattgtttcgttaaatccataatttaatttatagtacagtttgttacttataaaaaacttacacgtattagttttgttatagtacaatttattaacttaatttgattcaaagtttccagtatttcccacaattcaatgtcatatggtcaaacatttcagcgacttgggtcaacctcttttccatgttccaagacatgtgtctcgactctcagcgatttcaagatcattgtctcaatcttgttgctattttattttacgtatataggggtataaattatatatgattaagcttttcttttaaatttatgtacatcttttatagagttgtattttaaaacgagcctttatcaagttttagatttgaattagtggttatttatccattggtcacacgagggtgatgattgtgattagaaatgtcatgatggaataatccaacctaatccaatcctagctagtagatcttgctgattggtctcatacagttttataaaatgcaagctcaacgtttgtagtcatgcaagccagttcaattagtgacaagtaacaagacagattttgcagattttacttagtacggtctagttggagcatatctgatcttgatttgttttcaaaacataattgtgagctggtcttgacaacctagttttttttttcttaatatatatagctaaagtatattttgaaccgaaatccaaactaatctcttagacctgtaaaacattgattcatattttgtcatttaaagccttacatgtcaagaaagaactgtaaacggtatttgtaaaaagagtaaaactcgatcattggccttgacccataaaattcaccttaaacaaaccgttggaccacacgttcttagtaaattgactagtacatggagttgaaaccttttaagacgtgataagatcaatgatgccattagcaaatgtgttttgtaacaaactagaaagtgatggtctcatcttcacccattttggtagcacttttaagtaagtaacttaggcgtgtgaatgtccataaagtgagagaaaagagccaagggtttttggcaagttttggcaaatatgatgtgatagtcccaacaactttgtttatacctacctactcgcaaagagaagcacgcataaataatataaccttatgtcaataacttgaacttaaatctttgaaatatttggtctattaaagtcaagaaaattttctatatatataaaaaggaacatcaactattaagctatttcaagggaaaaaaaaaatttatataaaaaaaaaacactttataaaaaatacacaaatttaccaacgtgatgttggtctagtggtaaatctccctggaagtgctgggttcgagacatgttgggaagaaactattctccaaaaaatatgaatttaacctggtatgcatcccacttctaagagatgtaagatttttgggtttgaatttccagatattcaaataaaaaataaaataaaaaacacaaaattaggactcatagttgtgcttgcggatgttaacacaatttgcttcgacaagatatatacacaaattaggtttggttaattcactatccttatgatattcatctagcatctgatcaataggctgtgatcatctcagattaaacatagtataaccgatcgacttctaaaacatcaagacaacttacataaatagtaaaggatttctaacttctaagagattattctatattggttctctctaaaatcttgattaagatgataatttatgggaaacttttcacaaaatgttaatggaaaataatggtagataaagaacgtgggaaataagagaagagagacaaaaaaagacagaaaggcaaagactcgacaaattgggtttgatgaagtgtgatgccaaacttgtgtttgtcccaagacaaacaaccccgagaacgagcctcaatggcgtgaaccccttttctataccttgacataataaattcatatatttttaataaatagtatcttcaaccttttttgaaactctcacttttgtgtttcgtgcacttatctcacatagtcacattaagatattatatacaaatataataggtatatagatagatagatacatatatatgtgttagctccttttagttgatataaaagaagagaagaagaagaaaaagaaagatagcacaaaaaagcttctcatatagctaaaaatcactttgaagaatatgaagctaattagagtcaccctctttctttgtgcactagccattttattgcttgtaactccaacatcttctctacaacttaaacatccctactcatctcctagccaaggtaattaagttcactttttttgtcttaaacttttaaggtttgaatatgaagtggtaactgactttacttacaacaatacaggtttaagcaaaaagattgttacgaaaatggcgacgcgaaagctcatgatcatctctagtgaatatgtaagagattgttgtatgtatttatctcatattgaagctccagtttgatttctatgaaaagtttctaatcaaaccttctctattgcaaataataggtgatgacatcaacatctcatgaaggttcaagcgaacaacttcgagtcacttcttcaggtaaatcaatcatttgagaaattataagctgtttcttaatattatataaagtatttagacctttcttcttctttttcttccttaaagaaatcgataattagcaaactcacataacttaagcacacttctatagtagtcaaacgaagttcaaacaaatagatataaaagtcaaacatacgaatcattgaccatgtcagaagaaaatctttatcaatgtttcttttgctttcttcttcagaattttgttattatctttctaagtataatatataaaactaaacgaaaagattcgaaacctttctgggactttcaaactgagaagtataatatgagatgattttgtattaagtctagtttatgttttgatttcacaggaaaatctaaggatgaagagaagaaactaagtgaagaagaagaagagaaaaaagctctagcgaaatatctatcgatggattatcgtacgtttagaagaagaagaccagttcacaacaaggctttacctcttgatccatgaaaacattatattatttcaaaataactaataaaagttctagctagattaatatttgttattaggatggttattggttaattggttgtagtaacgtagtttagtttctttggaccattgaggaacaagttttggcgatattattgtaattaaaggaacatgttcgtgttatttttcttatattaatgataatggccgacaaaacactaaaactctggtttggggtttgagcttatttgctcttcgtttcacgcactgtaacatggtggttgagttggttacaataagtcaataatatatttatcaaattgatgatgcttacatatactaaagacgagtccacgtatgacaattagtatttacagtttatagttatgacaatatcaattatcaagagtcaagacgatttgttcatagttatgacaattactagtatttactgtttcgaaaaaagaaaatcagcgtaaagaacaagtaaatatttaacataattaccaaattactctggctcatattttcatctatttttcttaatttttataatattatttaggtttaaaattcgtaatacaaatattaatacatataatttggcacgaaaaattcgtgcagaaccgctacataccacatatgtaaacaatttttttcaagattggttcatctgagtcataaataatatttaatgacaaaaaaaacaatattttaaagtatttgatttgttgttgaattatttagattattaagatttgttttgtattttaaggagaaaattgaaaagatatggaagttgtaaaaatttgcattgaccatttgaccaatctgggtcaacaacaaacgaagaaacaaattaaaaaaacacaccagcttatctattgttagttttttttttttctgttttcaggtgttttcttaaatcacaagctacaaaccctatatttatcttctgcaacaagtcagcatcgaactctcagatcatttatcaattcatcttcttaatttacttgaccctttctctttacacgataatggcgagagataaagaagatcaaaacaatgagaatccttcaattgtccagaacatgtcatttccattcaacaccattttcttgatctcaagcgcaatcttcctcgtcacagccgctttctggttcgtagccgtcatgacattacattacaggaccgatgaatgtaaccggttcgtcacaactcccggaatattcataagcttctcattgcttgctatgtccctcactggattctacgcagcttacttcaaatccgattgtctctttcgaatccacttctttatcttcttcttgtggatgttcgttgtcgtgtctaaagcaatctttgtcatctttctacataaggagaccaatcctagattgtttcctgggaccaagatttatgagtttaggtacgaggattactcaggatgggttagtagattggtcatcaaagacgatgaatggtatcgtacaaggagatgtcttgttaaggacaatgtttgtaacaggctaaaccataagatgccagcttctgagttttatcagatgaatctaactcctatacaggtaatataacctaagctacacattaactaaatcaaaccgaatctagttttgattccggtttaatgtttttttttatttcattctaattttgtttctttttttatgacagtcgggttgttgcaaaccaccactttcatgtggattgaattacgagaaaccaaataattggacagtttcaagatattataacaatttagaagttgattgcaagagatggaacaattctgcagatacattatgcttcgattgtgattcatgtaaagctgtgattattgctgatgtacataatacttcattttccataacagttaacattattcatatcatctttagtctttgtatcggcatgaccggttggtttgcctggttaaggatccttcgagaaagtcagaaatagatttgtacacatatgtaagacacatataaataaattgtttctttttattatttcttataatttatatcccttgctcaaaaatcgctaggcgctagttgggcggtaagggtgagcctaacgcctagtaggaaaatcggagattatacgggattaatcggatattagttttagggttatttcatatttttaaaatatattaatccattataattaagaaaattatataatattgttttttaaattgtattaaacacatgaaaacaagattttctattcaaatttataatttttatacaaattacgaacataagttggatattttaaattttaaattttaaaatgaaaaaaaagaaaaaataaaaataaaaaaattgggctagccatcctctagacagatttaggcgggtctaaaccgacaaaaatcggatcaacgattaattttcccaatttagacaaaatcgttgcagactccatctgatctctatgcggccgattttttgaacaaggcttatatgtatacaatcaatttaaaccgattgaaagagtaaacaaaaggttataattttagtaactgtttgtttacttggttggattggactgtccgtcacctgccatttctgtctttgcacttaggaattagaaagtttatatgtatatttttcctggacggccactgaatttgtggatgtaatatatgagtttgtgtatcactgtattgtggataaaaagatttagggctaagcgttctttagaaacacagactgaaaatgtgaaatgaaagcatgtttgttgatgatttttgtgaattacaaaaagaacttagagaggatataatgtaaaaagacccccttcttcataattgggccttagttataattcccttggaattttatggtatgagttttttttgtttgacgagatccaacgccaacaaatacgaagctaacaaactctctcatctaacaaactatttctaaagttacttttttatttgtttcaatatatcaatcaatgaatataaatataaaaataaagaaaaccaaactattgtgatatcatataacaaccaaaataataaaattttatccaacctcttctactatatatgtatttaatctatatatagtccaattatagaaacacgagaccggcatgtacgcatttctgtttcccttctatctcaaaccccaaacgttccaatttctaaatacagttctctactttagtaatgtttaataatgtttctttcaacatttcagttttctatacccgttgtgacaagacactcaaattttccaggacttatgtttgactattttttaggcaaggtaaaaaattgcataagtctcgaaacttttgggtgttcgggcggattggttagttagaaactaatgcacgtcagcctctgaggttccgtgtaatagattctcatgttgtcctttaaaaatgaaactcttccctttgattctttttgttcccaaaacacatttttctacatcttagagtcttagagaagaaaggcaagataatcaatctcatggcgatgtcgatctccggagctgtgtttaatggtttgggttcttcgttcttgatcagtcgaggcaagagaagcggcgttggacttggcgtagtagctatgagggttggccggaaaaatgtgatcacttcacctaagtgcaagaagtcgtgggttccgacagccgtcaaaggtgatggtaactcaaaactcgaccccaaatggctcgatgatgcctcgtaagtctatatcgttaatactgatttttcgttatactattataagagatattatgatagaaaaatcataaatgatacattatgatttagtaatatgtttcaccattactttttactttttggtcaattgttttcaaatttctgtcaattttttatagttatttttttagaaataaaatttgttgatttttttttgtttgataatttattctcttgagagtttttttgttaactttatgaaatattacacataaatttggttttcataaaatgggaacactaagtatataaatttggttttcatacaaaacacatttttatttgttcatgtgtaataattttgtaaattgtcacacacacacacaaaagacagaaagcttccgactacgtgaaggagaagggaagcgaagtgggacatgcgtctgctcagaaagggcaagatgttaatgatcatgtagatagagcaaagtactatatgtttgagaaagctagtgaagcaatcgacaatgtggctgaaattgctcagtttgcttcggagtttgtgacggagaaaggcaaggagacgaagaaagaaactgcttcaatatcggagaaagccaaagacttcattgttgaaaaagccggtgaaattatagatatagcgacggatgtgagcaagaaaacggccaagtacgtcggagataaagccaaggaggttaaagaagctataatgcctccaaaaacttaaagtaaagatttgatgcagccctaaacatatacgaggtcttgaggcaatgtagcaaaaaatatgtattattatgcgagataatgaaactgttataatcagaactctaagacacgcctctttaatcattggaaaattctcttctaagtatgtagtatgagataataattaggatcctcctagcaaggtaatgatgcctagaaataaggatacagtaacccaagtgatcaaaccggactgcaacaaaaccagagaaagtaacagatcgatcaatttcaattacggttatcatttgaattaaccggtattaacaatcaaaccggagaaatgaagaatcggtttttacgcttatggttgatcttgtttcttcctcagttttgttccacaaacaagaataagatcgctttatctgacaataacaagaccagacattacttttgcagtccatcagctaagtcagttcatttcagtaccatcagatgttcatcttcaagctacatacaaagtgctcatgtatattaaatctaaccatggtcaaggtttaatgtactcagctgattcagaattatgcttgaatgcttttgcggatgcggactgcggaacctgcaaagatacacgtagatcagttactggttattgtgtttatcttggtcactctttcatggaaactaaagaaacaatcagtagctattcagagtagtacaaagcctgaatatagaagtcttgctcatgccacttgtgagattatttggctacaacagctgctttaagacttacacatcaaagttacttgtccggcaaaactcttctgcgacaacaaatcagctatccacattgctatgaacccggtatttcatgagaggactaaacacatagagatagattgccatacagttcgtgaccaaatcaaggctggtcatctcactactctacatgttccgactgagaatcaacatgctgatattttgacaaaaccattacatcccggtccattccatcatttacttcagaagatgtcaatttcaaatctttatcttcataaaccagacacttagaacgtaaaggtttgagaggggcgtattatgatatatggtgcgacaggttaacatcagttatctgatggttggtttagtatggttattagtgatgtatatataagcttaagtacactttatttagattaagattttgtaaaaacatttacatgataataaagattctgttagatatgagttttagctctcctctgttcccttctctagcttgatctctccggtgtatcagacttcaatagtttataatttacttttcgataacgattatgatttgtccaaaaaataaaagtgaaaccaaaatttaattaaacaagagggagattataaaatagtcctcactacggctggacacgaaaaaatatcctgaaaattagtgatatttgttattcgattcgttttaacagaataattgattttatgatttgctttcatccaaaatattcggatacccgaattttttttgtgatgattatggatatccactttgatatatctattttttttatatataaattatttgatatagttttaaaataagttccaaaacacacattgttgatatcactgatcaagaaaatgctattaaattaattctaaaaaccaaaatccgatagtttaagatgccactaacatgaaagaaaaatgaccaaactaataacttaacacaatatatccaaaggagaaaaactaaagttacaaatactacaaacccaaaatatacaattatacaaactatattatgatatctacatatatatacatgactatatattctaactagataaggatccgtccgatggacgaatttatttttttataactaaaattaaattcagtaaaaataataaataatgacgttgtaagtagaaattatctttcaaaagtaaaatatatttatttttactgtttattgtgtttttcaccactaatattattgattaaaaattatttgaatgaaaaatatatcacattgactaaaaccctttatatataaagatgatctatcaacgttgactaaaaacttttgaaatcatgacatatgataaaacttttgattgataacttattcatgataatattagttactaattttgagaaaaaaatctattatattatttataaaatgtgatatccgtcaatgctgaagataaatggttttagtagaaaagcattttcaggccgatttgacccgactgagttcaaacggatgtatgtggagcttttacaaaataaagttgactcatttttagttatctattttgtatttactttatcagcgttggattaagtaagacaatgacaatctttggaagttacatcgtctcgttggaatacgcacaaatgaagtctcactcaggctacgatgaccaatccaagcaatagaggagagattaagagtcttagagtcaaactggtctgcaaagaactttataaagtgatgaggatcaaatgtagaagatttgaagatgacatagaagaaattttcgaattcacatgtaattataagtcttttggttttgattcatgaataaagtgattctttcttcgttaatgattgagatttcggtttagattttttttttagtctaaattaaggtcaacaacacgtttgaatctttattcatcttttttttacggctctaatatctcttaattttactcgatttggtgttatttaaatttcgattcggccgttgaatacctgaaattttgctaggtcaagttattcaaatctttttaacagagatatttactatttgcgagtttataaatgtgtgtgcatttttcgtaaaagaatcaaaaatttcttttttggagttttgtgtcgatagatggttaagagattttaccaaatgatttactttacgacttacaagtacttcacaagttcatagttaaattttaaaagcgttgctcagaattagaggtggatcaaacttatgtttcgttttaattttatttttggttaaatttgttagtaattgtttttaataggttgtgccgttgtggtaaatttgctttgtgtttaccagttatcttgttttttaaacatctattttattagattaaaagtaaggagtataatgacaatgctaaatttagttgtctttattgtaatttctattcagatgatgtttattcttcttagctaactgaacaattgtattacgattttattaattcctaactaatatccccttccaattttatttcgggtttagttaacaatttaatgtttagttatcggtttatggttcaatttacggttcagttcaaataatatggtaaccatggttagggatttaaaccagagtcctttacgagatcagagttaaaaaacaaaaagcgtcactaggaagctgcgactatttgactgactctgatttcacgcgactccttgtgagattctccgattgcttcgcctgagtttctgggttaactctccacgccgtcactttgatctttgcttttccggtgaggtttcttcatccacttgttgatttccgaattcacacattttccgaatccacttggggccaaagaattgcaaaccctaatttttaatcatcaactctattctgaaccaatttgatttccgttttttgcagatctttagggtttttgtttagggaattgtcgaagactctgctctaacatggtaaagtttaacctaaattgaagtagcaaagtatcattgttatatgagtcgagttaattcttaagcgagtgtttgttattcacagtctggaagaaaagaaacggttttagatttggccaagtttgtagataagggtgtgcaagttaagctcactggtggtagacaaggtaataaaacaagtgtttctctcattatgctccaaagatgatgattctttctaatgttttctctgagatttgtttgatagttgctatgttttttgcttgcagtgactggaactcttaaaggctatgaccaattgcttaatcttgttcttgatgaagcagtcgagttcgttcgaggtatcttttatcttacctatatctactgcattgatcttgttaggctacaattctctagtggaatccgcctcttagtaaacgaatctctgtattgctatgaagtttattactctggttcatacagatgtctccatgatgccattggaagatatatggaaattttgattagaagagactgtttgattgcttaatcatgttatgttggtgatatgaatgggatgatttcattctcttagctagattttgaaactagaagtgggatcatatttccatagatctaactcagttttatgacccttgtgttatgttttgatcagatcatgatgatcctttgaagactacggatcagacaagacgccttggtttgattgtatgattcatttaccttcttttttcattactataagtgtaatcctgtttagtgcaaataatatcattgtttcttctagcatcgtgttatttgtaatggagttccatagtttagatgctaaatcatgatggtttgtcttgtttttaggtttgccgtggaacagcggtgatgcttgtctcaccaaccgatggcaccgaagaaatcgctaacccgttcgttactgcagaggctgtctaaagactttcttctcaaagaatatgtctctctattagtttaacttggcgatttagagagtatttcatctaactctctggtgtgatgttggaaacatatatgttcaatttaaacaatttggaacatcatggacacttacctaacttcgttctcaaatctcgttgtgccaaagcacaaaatctccttaaccagaactgaagtaaaccggaaaaatcgaatgtctgagtcttctcgttactgaaccatggatttataagcgagtgatttgaaatttttgaagttgtttccatagttttagtggagacgatgaagtcagtaatgtcaaagatcaaactttttagaccagtcgtcacgttacgttgttcttacagctccacagatcaaactcttcttcttagcgaatttaccagactctgttaccagagagaccttcccagagctatgaaagcaatggattcattgcaaagtcatggtctttgggcagactctgcaacttattctgagcttatcaagtgttgtatatctaatagagctgttcatgaagggaatctcatttgtcgtcatttatacttcaatggtcatcgaccaatgatgtttctggttaatgttctgatcaatatgtatgtaaaattcaatcttttgaatgatgctcaccaactgttcgatcaaatgcctcaaaggaatgttatttcttggactacgatgatttctgcttattctaagtgtaagattcatcaaaaggctttggagcttttggttttgatgttgagagataatgtgaggcctaatgtgtatacttactcttctgttttgagatcttgcaatggtatgtctgatgttagaatgcttcattgtgggattattaaggaggggttggagtctgatgtttttgttaggagtgctttgattgatgtgtttgctaaactgggtgagccggaggatgctctttcggttttcgatgaaatggttacaggtgatgcgattgtttggaactcgatcattggtgggtttgctcagaatagtagaagcgatgtagctttggagctttttaagaggatgaagagagctggtttcattgcggagcaggctacgttgactagcgtattgagggcttgtactggtttggctctgttggagcttgggatgcaagctcatgttcatatcgtgaaatatgaccaagacttgatactcaacaacgcactcgtggacatgtattgcaagtgtgggagtttggaggatgctctccgtgtgttcaaccagatgaaggagagagatgtgattacatggagcactatgatttcagggttggcacagaatggttatagccaggaggcactgaagttgtttgagcgtatgaaatcttctgggacgaagccaaactacattacgattgtcggggttctctttgcttgcagccacgcagggctcctggaagatggttggtactacttcagatcaatgaagaaactttatggaatcgatccagtgagggaacattatggttgcatgattgatctgcttggaaaagctggaaagctcgacgatgcagtgaagctgttaaatgaaatggagtgtgagccagatgctgtgacatggagaactttgcttggtgcttgtagggttcaaagaaacatggtgctagcggagtatgcagctaaaaaggtcatagcactcgatcccgaggatgcaggaacttacacactattgtctaacatatacgcaaactctcagaaatgggacagtgttgaagaaattcggacacgaatgagagacagaggaatcaagaaagaacctggatgcagctggatcgaagtaaacaaacagattcatgcttttataattggagacaattctcacccacagatagttgaagtcagtaagaagctgaaccaattgatccatagactcactggtattggctatgttcctgaaacaaactttgtgctacaagatcttgaaggtgaacaaatggaagattcacttagacatcacagtgagaaactggctttagcctttggcttgatgacattacctattgagaaagtcattaggataagaaagaatctgagaatatgtggggattgtcatgtgttttgcaagctcgcatcgaagcttgaaatccgcagtatcgttatacgagatccgatccgttaccatcatttccaggatggcaaatgttcttgtggtgactactggtaacaatcagatgactttagattactatgaaacagagtataagatggtttagaagattgtttctctgcaagttttcttcatcaaattttttgattagtgaatcatttttgcttatgaagaagctcattgatttgccaaattttcctgataggattttgtaacatttgcaaaattgaatatgtatgataaaattggtcattggagtatggagactcactaatttagtaatttgtgataaaaaagagtttcttcagaataacatgtatttaattgtttcctataaatgtatagcagttgagttaatgggaagacacttgctgcacatggatatggatcatgtatcataatttatgcttaatctctctttatttttctgaaataaaaatcagtataatagtcaaaaagtgttcaaagctgaattgtgcattatggagacaagatcttttatgtccaaagtggtttaatctcattatatattatgattcactattactcatgtggacttaaaagtgccatcgtagtcgctttattcattcgatacctaatggacttcataattatattgaaattattttttatgacttttataattacatatatattcattgttaattcttcagttatcttttaaacaagttaagatatgatttatcaatattcttattttatttttaacccaaaatacatatttttatcttaattaatctaattattttaaaaatattagataattattatttttacttatttcaaagtatttttggtcaggtattactaaggttataaatatttttaaaaaatcatatgtaaaatcatatcttttgtaaacataaataaatttagctaatttatcttataattatatccttgtcggtgtatttcttgtgtcgaatgtatttctaatcatttgtacaatatgaactatgatttgtaattaattaacttgtcactagctaattttaacttcattttaattatgggcttttaaattgttaaggcccaatttgtagcttcatgtcatcgctacatcctattaaaaccaagtcggcattctcatcctttgccacgtaccacttccagatcggacggtcaagattccataagaatctataatcgaacggttctctttgcctgttctagactcttccaaagatggggacgatgatgcatgttcttttttactattttacctgtcaatatatgcctctatttacttcgagactttacgctacatatgtcaatttatgcctctatttactatgctatttttttacgcttaatgttacaaactttaatgttttctttatgataaaatgggtatatattttcatttttttcaactctttattggtgagatcgcacgtctttgccgtagtgattcatatagaaaatatctaagggaacatgaactataaattaatagatttcacattattttgtaaccttgaattatgtgtaataattatattccaagtaatgtttagttattttctaaactatacataattcaataaataatataataatcgaaatcgtggacaaaaaaaaggtactaaaaactgaagaaaacttctatggaactaaagcttcacacttgtcatagatttatcagtttcatattattattgataaaaataatataaaatgaataaaaacttcaaaccaaagaaaatatgaaatggcaaatagagcaattataatttccactgcaaaggtattaaataataacgaaagaaatgaggaaataatttaaattgtagtaaagaagaagacaaaataacatttcaaaatagattttttatttcccaaaatataaaaatagtagattcgattacaaaattcttaaccaaaatcataatctagccggtttaataaatgaaagaaaacaaaattaaacagggttatctaaaaaacaactataggaataataaataatacgatgacgtgtcataaggatagattttagaatttaatccaataacaaacaagttcgctgaaaataaaccatggttaagagatttaaccagaggactcagatcagagttaaaaagcgttcctttgagaggtgaatcaacgaaggagacaacacaacacacacacacacagagagcaagcaaaagaggcggctagggatcagagagtggttccttcactgaaagtttcttctttttcattctcttcttctccttcagattccttgcctcttcttcaagattctcctctcttccatgtgcgtttctgtgcttttgaagacgacgatgatgatgatgatgtctttatattgaaaccaaattcgtctccacgattgtttcttctgagttttgatttttcagatctcgcttcttttccggtgagtttcacgctttttctataaagctcattgatttgttcttagttttgtttctcttcaatttctggaatcgatcaagatcttaatttgatggattagtgagatttaagatctgtttttttcttttgcagatttgttcaatcatcatggcttacctgatgtagtaattgggatcaaattcattcacaaagctcgagtttttattattagtggctactgttatctgtgtatagaagaagcttgtgtgtgtggttctctacgtttcatgatcggtttaggtatctgttatatccggctcgtgttggtttcagatttaggcactggtctagaaggtctttcttcggctactgcttcttctgttcaccaaaagaagccttttttggtttcttcttctgtttcatgtcgaggaacttagacagtcctgttcagacacaaatggcagtggcagttttcaagactcctcttactggagctagtaagatggaagggaagcagcatcataagcatcagcatttacagaggcaatcatcggggaggagagttttcgtgcagactgaaactggttgtgttttggggatggagttggatcgtagtgataatgttcatactgttaaaaggaggcttcagattgctcttaatttccctactgaagagagttctttgacttatggtgatatggtgttgacgaatgatttgagtgctgtgaggaacgattctccgcttctgctgaaacggaactttatgcatcgaagctcgtctactccttgtctttcgcctactgggagggatttgcaacagaaagatcgaagtggtcctattgagatactaggccattcggattgcttttcgattgttaaacatatggttaaggacattgttaaggcgatgaagatgggtgttgaaccgcttcctgttcatagcgggcttggaggtgcttactattttaggaacaaaaggggtgagagtgttgccattgtcaagccgacggatgaagagccgtttgcacctaacaaccctaaaggctttgttgggaaagcccttgggcaacctggattgaagtcttcggtgcgagttggggaaacggggtttagagaagttgctgcttatcttcttgattatggtcgctttgctaatgtccctccaactgctcttgtgaagataactcattctgtattcaatgtcaacgatggggtgaaggggaacaagcctcgggagaagaagctggttagtaagattgcttctttccagaagtttgtggctcatgatttcgatgcaagtgatcatggtacttcaagcttccctgtaacttctgtgcaccgcattggtattttggacataaggatcttcaacacagaccgtcatggtgggaatcttttggtgaagaagctcgatggagttggtatgtttggtcaagtggagcttattccaatagaccatggcctctgcctgccagaaacacttgaggatccttattttgagtggattcattggcctcaggcatcattaccattctctgatgaagaggttgactacatacaaagtcttgatccagtgaaagactgtgacatgcttagaagggaacttccaatgattagagaggcgtgtcttcgggttcttgttctctgtactattttccttaaagaagcttctgcatatggtctgtgtcttgccgagattggcgagatgatgactcgggaatttcgtcctggagaagaggagccaagtgaactggaggttgtgtgtattgaagccaagagatcagtcactgaacgagatgttttctctccaaggtcagatgtagtaggagaagcagagtttcagtttgatctagactgtgatgatttggagtcagtctacagttctaagatacaactaaccgatgactatttcaccaaaaaccctttttcaaatggacgttcttcgctcgggaagcttgaagaaagcatcaaggaagaagaagaagatgaagaagaagaagaggacaaaactgaaaatactgtccctatgatcattatgaaagacagtttttttagttcagctgcttttcatgacaaggctccatctctttcaaagctttccacttcaatgaagaacacacatcttagtgacacgacacgtaaaaacccaaaacccttaaccagaggcaaatccgagaacacatcgtctggtcacaaaagcgcaaacgaacagcttccagtgagtgcaagctttgtgaaagtagcagacatgaaagaagacgagtgggttctcttcctcgagaggttccaagagttacttggaccggctttcgcaaaacgcaaaaccgcaacgttgagtaagagacagagacttggcacttcatgccagttttgagagtcgtatagtaaaaagtaaaactcgagaagttaaaagagacagtatggagtaaaaaactgaagacttcttcttcagttctatggtagtaaaaaactagtagttacttttggaaggtttggcttatgacaagcgacgaggtgaagaaaaggggttttgtttgtttgtttttttaactgttttgtaaatatttcttttactactctttgtgatcttctttgtttgtttgtttggttttttttttgccccttttatcaccttctcttgtttttttctttggtatgtccttgtggcttggccttgtcccataaataatattagtcttctttcactttttggtgtggtcgttcattgttcatacaatgaaacccagacatatatagtggaccgtttgatgtatgattcagtatccgcataaaagtatcacaccgatgtttagatatgtatgttgcggttgtatcacctaaccgtcacacactgcatttttcaccattcatagtttaaatgtcctagtggcttggccttgtcccataggtttgataggtgttacaaagagagacaagagaaagtggtaaagcgtaagcgtgatggtcccaaagacagctgcaaagaaagcgatatgggcatcgacgacccattttctccattatccattttatcatatcatcaggttatgtacaaagttgtcaaaaaagttcaaagaatcataccaaatttcgacgcaacaaaacgatgatattgaatgggaccccatttgtgggtaaggggttatcatttttatatccgtcctttcgacaagacaacatcaatttaacgtaacattcctttgatgtattttttttttcgtgtgtaatagtacttgtacttctatatgtaataatgtgtactatccaagaggcaacaacactattttacatatgaagttttgaattcttcggtcaatttttttttttttcatatttgaaatcagccatggatcaatataataatttacaagaaatcagttactacatacaatataatcgtatcgtttgattgtttcgatggtggtatatgttttgtttacaataaaattcatatgattggtttccgtacctattatatttgaaatgttctaaattcaacctttttctttccttgatgagttttatgtatgtagggtattgcttcgaagcttttcgcattcaacaactttaaatgttttgagcattattcgacaatcttctttttaccttgtaagaaaaaaaatatatacattcactatgtgctcttaacgtaaaaaaaacatttcgaaaatattagttttgacatttcgttgttttactacgtatctctcatcacatacgattttaacaaaaaaacgaaatctctcgtcacatacgatatctttatatttttagttttgtagtgcctgtatatgaaatttatgtaaataagtaaaagtaacgtttgtcctaccaacacaataaaaaatggacatatcatgatgttttgttttggctttggatatgatttatcggcaacttggtcatcgttcgtttggtgtatgatttgatgtgaatgtgataaatatataagttttggataacttggataattaattaataaatgaaaaaattattaaataataaaaagaattctttaatttaatgatacaaaatttgagaatagtttatttagtgtgatatttggtgtgatggttggcaaaataaattaatatagtactaagtttatatcaaatatagtgttatttctaatactaaaattggtgtcatggttggagatgcccgtaatagtcatcggaggaacataaaaaatttcgataaagaatagaggaaaaagagacaagaaaacaaaacatatcttcattttgcaaagatttaaggataaatattgttttcgcaggatgcaacgagatatatatagataattttcaaatattgtatgttatgttttattttattttaattaattatttaatattattataaaattaaaggttttaggttgatattataaatatccttcttaagcttttttatcctttattttatttaactactaattttattaataaattaaaaagaaaacaacaaatctaaacaaataacttcgcatctatcattagaaattttacactacatcactctgtagaattaaatcgacaagaatgtgcaactcgtcgattcacaaaatgccagtgaatcgacgatgtgagaagattttcttcatttatttttgtttaataatccgttttcttttcatattgttgctaagcttctttttggtttaatctattttttctatgctgtagttgcaaatttatttcggttaaagtaataccctcgtaaactctctatatatatttggttaacaaactgtagaatcgaattaccattgaatgttaattttattctctaaaaaactttgctcattatatacttatttcacttttcgtggatccataatagcccaattatacaaaacccaattgccactcggaccaagatacaaagttaagtaaacccacgaaagactctctcatccgtagacacattcatagcctactctaatcctaacttagtgattgttcgagtaattgctcgatacacttaactgctaggtagtatatacggggtcgatccacaaggaccaaagatactataaggatttccgagactcgttcttagctaaattggagaggttgtttgtttggttttcggattgtaaattaaaatgcaagaaactaaacgattaaacttatatgataaaaaatattgggccatagggtatttcaaagatcaatgattaatggaaatattggacaaggaattcaacataaaaaaccgttctcgaacatgaacacaagtttagactaattctctctcaagacattaatcaataactttgactacttaactactaaacttttatttataatttcctagtcaaagtcgcattagaattaggttcattaggttcacaatgcgttctaacgtcaactctcgatggctaaaaatacagtgctcaatttacattcgttcatgcattctatcggacaatggactctcctgtgaactttcctgagccagcatttgtgatcctagtctcagataaagtcagatgtgacccctaattcttccactggcttcatatgttggatattactagacaatacaatgttttcttggtagatccaactgagcgcgttccaccagaaagttccgagcggccaatagtgctctataatgaaaactacacttatgatagcgtgagaggaagggaatacgaaaatccgacagtagcggaagaccagggctgatactgattatatgtggactagctagcttctcttcgtactcgtggatatgcgggtaggcgtcacagagatctacggattttataacactcagttttattttagtctctctctacttgctaatttttaattttattacttcattcatgttcacttgtattttttggtccgacaaatttcatgagccaagagatcggcttgtgccatatatataatcagtatcagcactaaatcatacaattaacattttattgtaccaatgatagaaaaattaaagtgaacgacaaaagtaaagatgagtctaactcaagagttctatgcccacttagccatcaaagacattcccgcggcacctatgaaggtagcaacataaccgaggacatgaagtttcatattcccttgtatctttggtccgtataattcatgagccaagagattaacaagggccagatcaatcaataatcctgcagaacacgcattcaacatccccatcaagatcaacgctgtcggacttgtctcaccatatatcttttgtatttgcatccctaaagcaatcccaaattgcattgtgacaacaccattttccaattcattttgcttttaaattccgcctataacaaacaaagtcttataaatatgttttactacaaaatcaatgcgtattatagctatcgacttacatgtaaaatgggaccaccgagtctcattccttcagcgagttcatggaaacaaaacgctgcgataagtgatcgtatggtacattggttatctgaagcccccatcgttaaaccaatcaatcgttaaaccgaacacgaccgaaactacgacaccagctactttcgacgtctgcgccaaaacaatcatttaaattatttagtctttgatgattcgaaattccaaacctagatccaaactagtttttaacaagtaagagaaaacaagtttagtaaaaatcgatctctagcttcaactaaagatcataagcaatgataaatatatcaaagttgtaagtgcaccaaagcaatgactctattcctaagaagttgacttgtcttatcatcgttgaccttttcttgtaagtgcaccaaagcaatcattaaaacgagaaaagccgagttcatcgcgatgaaagtggtgaaaggaaacttcctccacgggtcttcaggcaaacatttggatgtgagatcatcgaaagagtccggtaacacatgcataaaagcggttgccaaaattacacccgaagttaaagtctttatgatcccaaatataactcggtcgggtcctaaagcaggaatgtaacgagaaaggaactgtaaagaaacaccgatcatgctcgccactaagatagatgggattgcaatcattttaagctttttagcttctttgttgttgtgacatgatggatctccagattcagctctgcattcacttacatctacgtttttggcaagagaggcaaatgtgaagtatagaaggaggattgtaatggtggtgatgagtttataacaagctttagaataagccattgaaaaaagtgaaaggacgcttgctgaagttttgtttttcttttgaagacttgaggagaaaatgatttcgtctcaaatttatagaagattgtacacaaaaggaaaacctcaagatggtggacagcttgtgtaaagttactttggaagcaccacgtggaaatattaaaaaatgtgagattttagtttcagtgaaacttttaatataattaagatctgatttagaactttttagaatttttctatgaaaaaatagaaaattgtatagattttttctcacatatatattagtaagagattttaaatactggataaattactttaattcatttattatttcttttaaaatgattaataattcttagaacatgtccattaacagattaatgtatgtataacacagaaaagaaaatagaaaaaactaatgtatgacatgcttcaaaatatatatgtatatatacttgtttttggttaattacttaattctctcacatttcctgcctaattgcgacataaccagttgattagagttaaaaaaaaagaagtaatttatagaacattaaatcacacccaaatcaatagaaaataacacaatccaactaaagcaaactaaataaattatattgaaccggtctaaacctgaaattagatgtttcttgagtgataatcaatccctaaattagggttgaaaacaaacctcatttttattgaaactagaagtctctaactctctccgacgaaccgttggaaaagatctcaggctttcaaatttgaataatgttagatattagagtgtttacttaatagatcccactgagtgcgtctctccacaaagctctgaatgaccatcattgctattagatcaaatatactctctttacagcgacattgaaagcaatgaaggtcctccccaaaaccgtagagcaattatagaagatcagggctgatactcatgattatatgttgactagctagcttatgatactttttaataatagagttatcttcttcccataaataatacaatctttgaaatcaaatcgttggttcgatagctggtaatttatttatatcgtcaagtatattattaacatgttaagtaggtttgtatcctaagtcttttcatccatacatcaaacctctatccatattttgctaacaatattatcctgataatacattatctgctaactattctgatgcatgtattttttctacatgattattcaatcgcaaatcaacttttttgctcttcatgctaaatattttgttaccttttaataataatgttatcgtcttcgcatatatatcagtctttgaaatctaatcattggttcaataactgagaatttgtttatagtcaaatatattattaacatagtaagttggtttgtaccccatgtcatttcatccatacatcaaactctatccatatttcgctaacgatattatctcgataatgcattatctgcttaactatcctgatttttatcatatctccttatagggatatatttgtcatatagattctagatgaaaaaattaccgaaataaatggttttcatgtgtagattcttaattatttgttgtgcatgtataaatttttaattcacccaaaagttaattatactgtgagggccatcatatatatatatatatatatatatatatatatatttttttttttttccttccaaaacatttattattaacccggttcagcgtttacaactgttactagaaaattaggacatgaatgaaacaaaaaaccatcatcaagactacgttgagcttgtctggccaatatgtctgcacatttattctgctctctatggtggaaagtgaactttgtctctgtgaacatggaccgccagtgccagatctcatcaagataatgtcgtagtcgggaagttacaactttgctattgattagtcggattatgttgagattatctccatcaaactcgacctttttgtagcttaagttccatgatgcccgaagtgcccatatcaatgccgtacattccgattcttctaccgttgcccgtccttggaatttactcatgccacattccatgaaagtcccgcaggaattgcggattatccaccctataccagacgcacttgttccttcatggtgagatgaatcatagttgcacttaacccaacctctttgtggtgttgtccacttcgctctagaggatcgatgatgattaatatcggttctccggagttccgcaatcgtccggttttctagccattttcttgagtcgatgatggccattggcttgttctacagcaacctccacagtgatcaatctgcgattaaatacgagatcattcctgcatttccatattcgccacattagccagaatgggagaagacattgaaaattgctgatttgttgagtctgggccatatcaagcaggagccgtagtttttctaacactgattggttaggatcagtcaataaaggatgatgatatcccgcagctctccatatggaggtggcatgtgagcaagtgaagaatcaaaactatattttatcatggcagcaaagaaagtagctatatttttgatcatattagcaaagaaaatagctatatttgatcatatcagcaaaaaaaaaatagaaaataatatatataaattgaaatagtaaaagatctcgttatctataaattcgagaccatttttctattctacggattaacaatcatatgttttgaataacattgttttaaaaatatctcaacgataattcatcgaatactatagattttattggtgtaaaggatgtaactagaaaactatatatcaacacaaaagaaagaccattacaaaaggtttgacactaaaaaaaaaacaaaaaaaagtttgactatttttttgtctttcgcagaaataacgattttgagaaaagtaattaaatttttaacatggtaatatgagaaattaagtaagtaacatgagtagtttttaaaaagtctattttctccttctgatttggtgtaggacgtgcgagtgaaacacacacataacgagagaataaagaagaatagaagaagagagaaaataatgatgatatgatattttttcccaagtgaatgttagattaatttcataaaattaactaactaaatcatctaatagtttttaataaaacatagatttttttctgtttataacatgatttaaatttttgaaatctgatacaaattattaaaatagtaaataatattggtctaaaacacaccaataaaatagtataaaataaaactaaatagtatagaacgaacagaacagtcgacaaacaaatgatggagctaaaccgatctgatctaaaaaaactataccccatgagatacaacattggcaacccaagcaaccaaagtaaaccgcagtggtgacgttgacgatagcggtgatagtgttaacggtagcggttgtggtgatgacgacaatggtactagtggcactaatagtgacgttgatggtggtgattgtgtcgatacaattgttgcagtgacaatgataaatgatcgagttaaaccgatctgatccaaacaattataccctatgaaatacaacattggcaacccaaacaag

SEQ ID NO: 162 - DNA, 103874 bp, Arabidopsis thaliana
gaattcaacataaaaaaccgttctcgaacatgaacacaagtttagactaattctctctcaagacattaatcaataactttgactacttaactactaaacttttatttataatttcctagtcaaagtcgcattagaattaggttcattaggttcacaatgcgttctaacgtcaactctcgatggctaaaaatacagtgctcaatttacattcgttcatgcattctatcggacaatggactctcctgtgaactttcctgagccagcatttgtgatcctagtctcagataaagtcagatgtgacccctaattcttccactggcttcatatgttggatattactagacaatacaatgttttcttggtagatccaactgagcgcgttccaccagaaagttccgagcggccaatagtgctctataatgaaaactacacttatgatagcgtgagaggaagggaatacgaaaatccgacagtagcggaagaccagggctgatactgattatatgtggactagctagcttctcttcgtactcgtggatatgcgggtaggcgtcacagagatctacggattttataacactcagttttattttagtctctctctacttgctaatttttaattttattacttcattcatgttcacttgtattttttggtccgacaaatttcatgagccaagagatcggcttgtgccatatatataatcagtatcagcactaaatcatacaattaacattttattgtaccaatgatagaaaaattaaagtgaacgacaaaagtaaagatgagtctaactcaagagttctatgcccacttagccatcaaagacattcccgcggcacctatgaaggtagcaacataaccgaggacatgaagtttcatattcccttgtatctttggtccgtataattcatgagccaagagattaacaagggccagatcaatcaataatcctgcagaacacgcattcaacatccccatcaagatcaacgctgtcggacttgtctcaccatatatcttttgtatttgcatccctaaagcaatcccaaattgcattgtgacaacaccattttccaattcattttgcttttaaattccgcctataacaaacaaagtcttataaatatgttttactacaaaatcaatgcgtattatagctatcgacttacatgtaaaatgggaccaccgagtctcattccttcagcgagttcatggaaacaaaacgctgcgataagtgatcgtatggtacattggttatctgaagcccccatcgttaaaccaatcaatcgttaaaccgaacacgaccgaaactacgacaccagctactttcgacgtctgcgccaaaacaatcatttaaattatttagtctttgatgattcgaaattccaaacctagatccaaactagtttttaacaagtaagagaaaacaagtttagtaaaaatcgatctctagcttcaactaaagatcataagcaatgataaatatatcaaagttgtaagtgcaccaaagcaatgactctattcctaagaagttgacttgtcttatcatcgttgaccttttcttgtaagtgcaccaaagcaatcattaaaacgagaaaagccgagttcatcgcgatgaaagtggtgaaaggaaacttcctccacgggtcttcaggcaaacatttggatgtgagatcatcgaaagagtccggtaacacatgcataaaagcggttgccaaaattacacccgaagttaaagtctttatgatcccaaatataactcggtcgggtcctaaagcaggaatgtaacgagaaaggaactgtaaagaaacaccgatcatgctcgccactaagatagatgggattgcaatcattttaagctttttagcttctttgttgttgtgacatgatggatctccagattcagctctgcattcacttacatctacgtttttggcaagagaggcaaatgtgaagtatagaaggaggattgtaatggtggtgatgagtttataacaagctttagaataagccattgaaaaaagtgaaaggacgcttgctgaagttttgtttttcttttgaagacttgaggagaaaatgatttcgtctcaaatttatagaagattgtacacaaaaggaaaacctcaagatggtggacagcttgtgtaaagttactttggaagcaccacgtggaaatattaaaaaatgtgagattttagtttcagtgaaacttttaatataattaagatctgatttagaactttttagaatttttctatgaaaaaatagaaaattgtatagattttttctcacatatatattagtaagagattttaaatactggataaattactttaattcatttattatttcttttaaaatgattaataattcttagaacatgtccattaacagattaatgtatgtataacacagaaaagaaaatagaaaaaactaatgtatgacatgcttcaaaatatatatgtatatatacttgtttttggttaattacttaattctctcacatttcctgcctaattgcgacataaccagttgattagagttaaaaaaaaagaagtaatttatagaacattaaatcacacccaaatcaatagaaaataacacaatccaactaaagcaaactaaataaattatattgaaccggtctaaacctgaaattagatgtttcttgagtgataatcaatccctaaattagggttgaaaacaaacctcatttttattgaaactagaagtctctaactctctccgacgaaccgttggaaaagatctcaggctttcaaatttgaataatgttagatattagagtgtttacttaatagatcccactgagtgcgtctctccacaaagctctgaatgaccatcattgctattagatcaaatatactctctttacagcgacattgaaagcaatgaaggtcctccccaaaaccgtagagcaattatagaagatcagggctgatactcatgattatatgttgactagctagcttatgatactttttaataatagagttatcttcttcccataaataatacaatctttgaaatcaaatcgttggttcgatagctggtaatttatttatatcgtcaagtatattattaacatgttaagtaggtttgtatcctaagtcttttcatccatacatcaaacctctatccatattttgctaacaatattatcctgataatacattatctgctaactattctgatgcatgtattttttctacatgattattcaatcgcaaatcaacttttttgctcttcatgctaaatattttgttaccttttaataataatgttatcgtcttcgcatatatatcagtctttgaaatctaatcattggttcaataactgagaatttgtttatagtcaaatatattattaacatagtaagttggtttgtaccccatgtcatttcatccatacatcaaactctatccatatttcgctaacgatattatctcgataatgcattatctgcttaactatcctgatttttatcatatctccttatagggatatatttgtcatatagattctagatgaaaaaattaccgaaataaatggttttcatgtgtagattcttaattatttgttgtgcatgtataaatttttaattcacccaaaagttaattatactgtgagggccatcatatatatatatatatatatatatatatatatatttttttttttttccttccaaaacatttattattaacccggttcagcgtttacaactgttactagaaaattaggacatgaatgaaacaaaaaaccatcatcaagactacgttgagcttgtctggccaatatgtctgcacatttattctgctctctatggtggaaagtgaactttgtctctgtgaacatggaccgccagtgccagatctcatcaagataatgtcgtagtcgggaagttacaactttgctattgattagtcggattatgttgagattatctccatcaaactcgacctttttgtagcttaagttccatgatgcccgaagtgcccatatcaatgccgtacattccgattcttctaccgttgcccgtccttggaatttactcatgccacattccatgaaagtcccgcaggaattgcggattatccaccctataccagacgcacttgttccttcatggtgagatgaatcatagttgcacttaacccaacctctttgtggtgttgtccacttcgctctagaggatcgatgatgattaatatcggttctccggagttccgcaatcgtccggttttctagccattttcttgagtcgatgatggccattggcttgttctacagcaacctccacagtgatcaatctgcgattaaatacgagatcattcctgcatttccatattcgccacattagccagaatgggagaagacattgaaaattgctgatttgttgagtctgggccatatcaagcaggagccgtagtttttctaacactgattggttaggatcagtcaataaaggatgatgatatcccgcagctctccatatggaggtggcatgtgagcaagtgaagaatcaaaactatattttatcatggcagcaaagaaagtagctatatttttgatcatattagcaaagaaaatagctatatttgatcatatcagcaaaaaaaaaatagaaaataatatatataaattgaaatagtaaaagatctcgttatctataaattcgagaccatttttctattctacggattaacaatcatatgttttgaataacattgttttaaaaatatctcaacgataattcatcgaatactatagattttattggtgtaaaggatgtaactagaaaactatatatcaacacaaaagaaagaccattacaaaaggtttgacactaaaaaaaaaacaaaaaaaagtttgactatttttttgtctttcgcagaaataacgattttgagaaaagtaattaaatttttaacatggtaatatgagaaattaagtaagtaacatgagtagtttttaaaaagtctattttctccttctgatttggtgtaggacgtgcgagtgaaacacacacataacgagagaataaagaagaatagaagaagagagaaaataatgatgatatgatattttttcccaagtgaatgttagattaatttcataaaattaactaactaaatcatctaatagtttttaataaaacatagatttttttctgtttataacatgatttaaatttttgaaatctgatacaaattattaaaatagtaaataatattggtctaaaacacaccaataaaatagtataaaataaaactaaatagtatagaacgaacagaacagtcgacaaacaaatgatggagctaaaccgatctgatctaaaaaaactataccccatgagatacaacattggcaacccaagcaaccaaagtaaaccgcagtggtgacgttgacgatagcggtgatagtgttaacggtagcggttgtggtgatgacgacaatggtactagtggcactaatagtgacgttgatggtggtgattgtgtcgatacaattgttgcagtgacaatgataaatgatcgagttaaaccgatctgatccaaacaattataccctatgaaatacaacattggcaacccaaacaagtgagataaccgtagtagtgacgttaacggtagcggtggtggtgtggtgacagtagcggtgatagtggtggcactaacaatgacgttgacagtggtggttgtggtgatacggttgtggcagtgacaataataaataatcatggtgacttcgtgttatatgcgataatgaaagatagttataataagaattttatataatttttgttttattaagatagaatagaaggagaaaaagacaaagacttaaaaaaaattaaaaaataaataaaagaactatgtatcctgtaacatggacaaatatgacaatattatagattgtacatagaatattgtagtggtatgattagaatagctgttacttaattaaagtttttttttggttatacactcaaatttccctttttttttttgagagtttgattttcaaaattgctattacacataatgtacatatacatccacatttttggactatatacgaacttgattgacccatataaaatttagtatttctgtacattggaaaataattaatattagtgtataggttaccaaagtttaaaaataataatcttaaacattcagaaagtacagttgctaatttgctatctttccaagacttctctagccttttctcaaaaactgcactttgcccattatactattttaattttcgtggacccaatttagaaaagcccaattgtttttgatccatcccttgagtgaggacctgttaatctgttacattgacagaattgccattgatctagtgatcgtagacacaattctcacattagttttttgcatgtaatttgatattttaaatgatattaattatgagattctttccacctaacgaaaattcctctttgtcaagcggattttccatttttgtcatctttcgtcaaaattagcaacaacattacttaattggttatcaaaaaatctttgactgtatatttccatgatttggtacccgaaaatatagaattatgccaatatataactatcttgttaatatttttgtaccacgaaataatgttaattatcagcaaatatggacaattcttttatggaaaacaaataagtaactaggtgtttttccttttttttagtcggcaataactaggtttaaaattgagactcttcttggcaaatatttatatatataaagatttcagtaaagattagagaagtataaacttcttcctcttcttgttttctacttgaaagaagagactctttcaattcactttttacaagagagaattaacagaaaaaaatgagattcacttctatgatttttgttcttgtagtgatactgataaactcattgtttaactttaacgttttggcttcatccggtatgtttttattgtccaattattattttttgtcatgtatagtaactattgaatattttaaaacatgttgtaatgtttatgtgtgcgtatctgttacactttttgtttttgtttttttaacactagttgttaatatgttgcagtgatcgaaacaacaaaaaatgatgtgtgctctactccatgtacacggaggtatggaacttatgaatgttggcatgactgcttgcacgagaggtataacgatggaggctgtgttgatggacgatgttgttgcaaaaagtgatagaaatcaatgaatggtctcgtttgaacggtggaattttgtttctttaacatcagatttatgtatgcttttcaatgaaataaaacttattttttgaacaactagaaataaaactaaatttattatattattgcttctatgactttagttacttgtctccacatttgttttcaaaaaaaaaaatagtattaagtttgcgcgatgcaaatacaggaatacagaaaagtttgcgcgatgttattctcactttgttaattatgttcaatgtttataggattagttatcgatcccctttggtttcctttgtgtacttaaatacttccaagtcatgagaaggaattagactttaaagtaaaaaccaagattttctgaataatagcgaagattgtgtatgtgtccgaaagatcatcaattcttatagtaagtggttatggtcagtaatatattcagtgacaccgatatgtaatttgtcaaaaatctttagattatacagataaagaccactatgtagacttgtgaatgaagtaaacattatagatattggcagttgctttgttttgatttgtatatattttaattaatattgtatatttagattatttcttaaaaagtctttaattttgccaattgttgccttacaaggatctattttaataaccataacatatggattaccaaaatctacagaaatattaggaaataattctgtttaaattatatagttactaactttacaatcttcgtgatttgcagaggtattgtatcatgttaaacgactcagaggagaagctaatgagtggatcttgcaaacattaaagaaggttagatacctaataaatcctatatcctatattgtataagtaaagacactgcaaatataagataagttataacctaaatgtttcaaaaccgcatacatttaaacttttaaacataatctaaaaggcaaacgattttaaatcttacatgcttaaacatatgaccaacaatatctaaagcatagttcaaagggaaaagtacttatggtttctcataattcaagttataaaacagactttaaaaattagactccacagtctccataaaaatatcatcatcttcatcatctgatccagcaaagttacgcctacaaaacatcaacaaaaaatataccaagttaatatatattacatatggaataaactacattagagataaggagggaaacttacagatagttgttcttgtctattcctcggaaatttggatcaacatgaacctttgaacaaccatatacgcttatcaaacacggatttcctgattaacaaatataaggtttggtaaattataaatccaataatgtagcacaaatatgtgtagaacaattagagaactaagaatgtaaccttaaaactgtgaaattttccaaaaacgaagaataatcatcacaggctccatcttaaagttaacatcacttatttttttgtaccattttctttcaaactcttcacaagcacttcctacagcaacacacttcatgtactggtgcctataatatgaagtgaactatttaaaatatttcaaaagacctatatatttcacataatgtattatatttgtaaaaacatacagagtatcctgaattgtgaaagtaaggtatctaaatgcaaaatcacttttccaatctcttgcaacccaaagaatttttccgatgggagatactgattcaatgactcccattgcatctgtaaaatgataataacacaattcatgtttctatttttaattatataagttcacattctctattctataatccggaaaataaatactaaaatactcaccaacaacaaatttgttttcagcagtagatgtatgcttgatccgatagaaatcaacacaatcaatgaactgacatcttgtcttaggcgcaacatgtttcattgtagtctttcgtgtaaacttaatttggaacacatgagtagagaatctttcttgtgtattagctacgaccacttcaaagtttgagagtagataccatttaccttctcttagtgtggaaatcaacacttctttgtttgcatgtagaggagaaaatgcatcaattcggtgtccctgagatcatgttttaaaatttaatcaaaacttacttcaatgtatttattgaatattagaaacatgataataagtataaaaatatgaaatttaatcatcaagtttcataccttctcatcaaccaaaatcatggtagttcttctccgaagtaattaaaaggtcaattccacaacctcaatagcttaacaatcacataccattttgtctttctcggatgcaaatctgaaaaatatgtagccgttgacatttcaggaaaactcttcttcctctctgattgtttattttcttgtgaggaatatgaatgggataagaatgacaatattgatatttccaatattacttaacgttactgatttttgaaaatatataattaaatttaaatttaagttcagagcataaaaaataaatgattacggttttgaaatcagactttcgtcttttgatgttttcaagttcactggcattgggttgtggttttcaaatcagctttcaaacttatattttcgatatatcacatccaacctttacaaaattatgatatatatatatataacttgcaaatatgattcatatttaaaaacaattgttgattcgtactgttgatgtcatcactttttaatcccgtattaagaatatagactaaagtcaggaaacttatttaggtatgcaaactttgtttatactaagtctaaagtcacaataaatttaaactggattcaaataatttgccaaggaagtcatattaagaaaccaagtaaattattctaaaatgaagctttattttaatcttggaaacaaattatcaagtactcgaaatgctctaacaaaaaagtaaaccaacgaagttcaaactcttaaataaaaacagaaacatcattcctagtaaagtaaaccaaactttgaaatgaagtagattattttggtggaaaatcatcttccacgctattcccactatctttgacactatcatttcaatgctctgaatgcataactttttagatgaagatgactgactctcacgaagatcgtctacttcgtccttacgcttggatgacggagtcatggaatgagtttccaaagagtcgaccctttcactactattacttaatggcatggtatcctaacaaaatattttcatattaatctacataaaaacaatcacgaactgtataatagaaattataaaattccaataaaatattacctgttcaactgacacaatagtctgaagatcatcatgcaagtcagaatcatgaatggtgtcactttgtaacggctcaagaccaacccaagcgtatgccactttgtatgtgtcattaccatcattgatgttgtctttctcaattgacacgacaaactggaatgtttttccaaccaaattcactaaaggttgtggtagaatagtaggatccttgatctgctttgataaattaggtggttaagcagacgttgaatacaagttagatataacaacatataatacttttaatcaaactatagaaaacgttggatgcaagttacctcatcatactctccattaagaagatcataagcagagaaagagacaatctgctttgcatcagattcaaagagcattaatttagttaagccacttgaatttatgacatcaacaatgagcttgtacctaaataacaattacattaggtcttgttaaaaaaaattctctacatagcgttaactaattatcaataagtaaacacaccttgggattgctttgtttgtagtctccttacatgtaccacactagaaaagtgatttccttgccttattaagaacctcattttctacctttggaactaaataggcagtgttcttgcacttggaacagatgaagtaataccacgaaaagtctttgtcaatgttaaaaatagtgcacattattttgaacttcccaacctaaaagacaaattaatgaaatcaatttgcatacaaaggtatattgaaaccaaaaatacaaaacagtgtgatttaaaacctcatttgactggataaggtctctaatagtacagattgacagattgttgtacatttcagccttgttttcagcatgttttatatgcttaggaacatgtacttgcagtgtcaaagacaatccatcttgtggtaaactacaaatattcaagcgcagataaaaacgttgatagattagagattcattcatataatatatatggttaaaagtctcatgacttactcgacaacaaactcttgaacttgaggatgatccggatcgatttccaacaatgacttatcaaatgcactggaaacagatctattacctgtaaacacatattagttgttaatctatattccataagtgaaaacggtttaccaatatacattacctttaaacgaattgatctgcaaacaccttttagtccataatggatattccataatttgaaacgggattataacagtgtgttacctttgaattcattgatctttgcgaaacgaagcaaacatataaccttcttagtcccgctgttttcgcaagcagcaattagtgtttcagcaaatctcccctacaaagtacaggtcagcctcacatctctacaataagttcatgaatatataagaataaaaaatgtgaagacataaagtagaaatggtaatcttaacctcgtatccctcaattcgaattcaagttttttggtagtcttgttattgacatcatgagttatcagctcgccaatgttcacaacttgaccaggtatgtctatacaaagaatagaacatggtcagatattcataatagttaaagggactataaacatatgaatatttcgtaattgaaagcaagtagattttgatttcttaccaaccaaaatattctcattcaaaccggtttcattgatcacatcattaaaatcgaccaaatccaagtaaatgtcatcggaaacagaagcacaaggattgacaacagagttgtacataagagacatacgataaggatgttttgtagctctgaattttctcattgccttagtcatggtaaaattctcaataacaatccatcgtccagcaacaatgtctctttgaaactttatagcttgtgccttcttaagtgttgcatgaattagagtaccctgaaaggaaaaacaattagtgaaaaaaaacaatcatatcaagagtacatacaaaaagttaatatgacaacttaaactcacataagtatctcccaaaatcatctcaactgtctcgcctgaatattgtgtgtactgtttccaagtatgaacaatcttcacttgaatcctccaggttgtcttgaatggcttgatagcattgaggctggtgaaaggagaggcagcgtttagagccattgttagcaagttaaggtttgctctacacgaaatggtttaatagttttggatgagagaagcatttcttgctcgacatgtatttatagtgtttattagtagctcgataatcggctattaaaaagcatattccgaataaatgatttagagaataaggttagttagatatagataatagaatctaaattgattaatgcaatcatatattgccgagtttaatatttgtgaataatgtgttcatcacgttaataatatgtgaaatattatgtttccaaatgcagaatattattggaatatttgacatattttgtagttagagaatattgaagttagtaagttaggatatgattcgagattatgtaaaatgttagtatctttaagcaaggaaagttggtagacgtcaataaagttgttaatcgaatgtaatgttagttaccatagtaatagggatgttgatcgattatcatgttagttaccatattagtaaggattgtcattagtagatattgaacattaatcatataccataaacatgtattagctccgagtttttctcacaaggttttgttaaggatttaacgtgtatttatatggaaggattaaaatcaattgaaatcaatttgaaatcaaatgacctgatttcataaattacccgtaaattagcccaatttcactctaatttcaatctaattttaattttaacccgacccgtttaccaaacgtacttttcttttaatagtatagggatattaattaaattgaaaatcagttagagaaaagaattagtgtttatcaaattgtttaaatagaaggaattttaaatttaacaaaataataaaaagtttgttttggtatgggatttagtgttatggttggagatagaaaaacaaattggacaccaaattgtgttttgatgtttcatggttggaaatgctcggatgagagttactatttgcattcatgtttatctagacatatgtcactaactagtagtactagttaagccaattgttctattgcatttttgtaaactaaactctatgtggaataacttaaaatcattgttaagataattaaagacaagagactaaactcaaccgagtaaatttaaatttgcaaaacaaaactaccgctccaatcatattttaaaatatgaaaatatgatgatatttacattcccttaatttcgtataatgatatgaacttcaatgtaatttaaataaaatggtattactttatattccttctattttatgaaatttgatgttttggattttaattttggtcaatagatattgatattttaggttaatattattattatcttcgttagtgatcaatagagagaggagagaattagaagttatattattaaactaaaaataaaaaaaatataaaagttatttttcttaatttgtgtggaaaactcaaaacatcattcttttaggaaatcacactaatgaacttaaaaaaaaactttgaaatctcagattaatgataatgattattattatttgtgatttttaatataaaatagatgagataaaattgataatcaaacattttctaaaacatatttagttacttacagtccaaaagatgaatagtcttggtttactgtcttgatacaaatttggtaaaacctaaaataaaagaaaatatattgtaaatgtattagtcattatatatactgaaaaaataacacatagaaattttgagcatacctgccaaccagcttcaatgctgttgagattgtttttgttgtagcttccagatgtaatccaaattagcgataagctgaactcatctctgctttctacggttggatcccacacacttattgtagcatttgctccgtacattttggttgaggttatcgtacttccgaccgcatgctgttattttccaagtcatatcatcaataattcttaaaacaaacgataattgttgtttaataatgtttatgatgtttctgaaatgattaatactatttcgtttttcattctttattaatatgtaatttaaaccgaaaatacaatgattcttagaaaacaaaaatacaatgctatttaggaaaattgttaatagaaaaaggggctaaggcccacaaacatttttaggaaagatccattaatattttttttaaaacaaggccctacaacatgttagtactatttattaagaagagaccaaaaatcatttcctaaggcccgtatagttctattaaaaaaatcttacttcttcatacataacaatttggtaaaagtaaaaaaaaaaattgtatatgaaaatcgattccttggttaaaaaaattaagatataaaattataataatgaaaatatgagttaatttactaactattaagtgatattcatttttttttagatataatttgttgtcattgaaaatttaactatgtatgtataagataatacctcatgtggagaatctcctattagagaagcaaaagattcatcggtagaattaattctttcgtacttccaaataggtacagttattttggacactcccaaatgctcacatgagcttcccttgtttcccatttgcttttatgttttatttggatagaatttggaattttcgatggttgtttctgtataaataatttgaaaagaattattatttgtcaaaaaatattattgaaattttaaaataaaacgatattcaatatataagatacacaaaatgataaaaaaaaagttaattaaaaaaataacctgaattttgtggttttttaaaagctcgtgttcaaatgctggctgtttatatatatctacacattcgacactttctttatctgaagtctaaaaaaaaacatatattagcataactatttaaactcacaaacgatagaatataactatttaagctcacaaacttatttcactggttaaacttcgttttcatagcttttcgtccacattaataaataaacttgtgcatgaaaaaagtgaagataattatgagtataagcatatttagtaattaaaaatgttccaacaagaaatgggaaaaaggttgaaagaatggggaaaatatggtccaaacaaagaggaggaaacgattgtgacaaagctgaaagagagaaaacaatcaatattcctttaaaaaaacacctgatgagtagtatatcattttgcagaaataaaggcttcgaatggaagatgcggtttaagcagagcagatcaagcggttcaaccagatcaagcagaacaaaagcagatcaagcagatctagcggtacaagtgcagatcaagcgggtcaaacactttaagatatttgttgaatggtaacacaaataaaatattgcagagcagatatttatataataaaatatattaaattttttgaaatagtttttttaattaagcattaaattaattttatgaatccaaaatactttattttgaatcttatattgtaaatttaaataaaataatttatacatactataataaaatattaaataaaacttgtaataacttaccttatttcattttattgttattatagcaatgttatttagtgtttacatacgaattgataacatgatgtaaattattttttaatatttattaataaaatatttgatagttaaaagagtgttgcataataataaaaatggtgaaaagaaaataataaatgaaaaggtattccaaaaaatgatataaaaaactttagatataattaatttgaattttgataaaaaaataaaaatttaacttgaattaaatataatataataattatgattaataaagatcaagatggactgttaggttttcgtggcagatcattttttctcttgaactgcttatatttgctcttgcatgtttccaaaaacagttcaaatattattttcatttttataaaaataattcactctaatgcctttttctcaatgcccttttgcaactctaccattttttttcccattttcatttctatcctttctaatacttttctctccaaattacccttaatgagctacccacagacctaattcatttcttcactctctctcttcttcctccatcggaaattgtgaatgccgttgaatcccatgccgtcggaaataatgagtttactcgccgtgaaaacccatcttcgccgtcgtaagtagagctatgtgtcgccgtcgaatctcttgcgtttcccaggtttgattttataatgttagcttaaatcttcgttttcgaattggtttattcgatttttgttgttgattctgtgaactcgttatttgaatcctgattcaatcgacagtttgacatttgcttcagcttcgaatttgaattttgtttgagatttgatgattgaatttgtttctaaaatccttgtacattcgttatattgttctaaaatccttttgaattcgttatactgtttcgtgatagatttgcttatgtgaattcgttatactatttcgtaatagattttggttctgatttagtgtttaccgtcggatctatcgatatctctggggattgtttgcgtcgtagagaaatgatctgaatccttcagcgaagaacaggtttatcggagaggaaattcgtcggcgattttggggtttctcagaaagaaaattcgtcggcgattttgagtaaaatcggagaggaaattcgttggcgattttgagtgaaatcggagagggaattcgtcggcgattttgagtgaaatcagagaggaaattcgccggcgattttgagtgaaatcggagaggaaaatcagagaggaaaacgaagaagtttgtggcaaaacgaagaagtttgtgaaaccaacgtgaaacctaatcattcagagggtaagacagtcatttggcatattagaaggggtagttttaaaaatggcctttaggaaagggcacttttacaaaaggttattagaataagggcagttttgcaaatctccctttttataatcatgatacacttttactgtatcaaaattgttgaatgggtaactaaaagtggtacgtcccaccttgcagttgctccgccattagcccgcagttccattcaaagccaaaaagcaacgacctctgaaagaatttaaaaatatggatttcaagaatacttatagtcataaaatatatgagttgagagaccattatatttaaaacaaatatcaaatatgggtttcaagaatagacttgtatgttaaataattcgaaaacctattttcaaaagtatctttaataagtatttctttactgaaaacaaaatataactgctaaaaaaatacgttaaaaaaaataatgttgaataaaaatagttctatttgaaaggacctgttagactatttttgtggatccaataggctagactcggttgacgagaaaatgctgagttattttaaatataagatatatatgtcgttatgttctagaacctaacatctaataatatggttgtatcgctagaaaatggagacgttaatgtcacagtgtatgtgttagaaagaaagatgacacttttcgttagttgaactctttgatggaagaccctagctaatctcatgttacagtaaatattaatatttcaatatctctctcgaattttctgcgttagcagtctaacatgtacatatatatatattggttttgagtgacgttgaatcaagtatacgacaagaaattgaattaattggtccggacatatccaacaatagttatatataagtctgaaaaagaaatcaataagggggctaaacttgggaagtaaatgattaggtagcgactgggactgggagcattgggttgtcaccattcttggaagttggaaattgcaataaatttgaggagcaaagaatactcacgactcacaagaaacaaataaagtgaaagtatcatttaaaaataaagtaaattagatgtaggcctttttgcttttaggttgtgagtttttaaaaataaaaatttgactgttaaatatctcatgatctttatcaaaaaaataaaaaatatttcatgtttgattatagtcatttttttttaattttttttttaaatattagtagattataaactataattgttgatatttcttataaatatatataatgagccaatgaacactgaaataaccactagcaatcagtaaacataatttaatttaaaatacaagtttaaaaccagataaatcgaaataatttctataaacttataccaaataaaacatattcacagaagacatcaaaatacattatgttgtagaactcttaagatttgaatccgcatcaatgcattctaaatcttctttttcttcaatgcctttgaaatcgtttcgggtcaataatcaacaatttctatatatataatagaatttaaattttgttgacttttgacatgtgaaaaccataaaaaatatcatagataaagcttttgaaatattaagtaaatatgataacaatataatatgtaaatccatccaaccatgtttgtaagaaaacaaaattaaaatatacttttgaagatttttcgtgccagcatgaaacccaaccaagctaaaaccctaaaaatcttttagccacaaatgacttaacctaacaaatctatttttttgaaacatatatatatatatatattttaagcccatatatgatatttttcaaaattaaatcatactaaaaacaaaaatgactttagaggcttttaaattagggaaatttactagggagacccatattttaggtttaattactagaatgatataccaaaaatgtgagttatatgagtaatattttggtctaaaatatcctttattgttttgttaggaaaaataatattacaggaatgccattactatttaattccagcatggcaaaaaaaaaaaattatttacgaaaatgccactccagtattttggtcgagttttataaatttgtgtatccttttgcgacagatttattgtatacgacggatttgttgatccaccacagtttttgttcgacagacttatttgcaccacagatttatttagttttagttatgacagatttttggattctcgtagattatttttttgcgacagatttattttctgtagactctacagacttttaaagaattattaaaatttataggtacataaacaagtcagtgacagatttgtttagaaaataccagagtttttctgttttgtaaacagatttattatttcataattaaaactgtcgtgttgccacagtttattcaacaaaagaaaatgaaatttaatgatgacagagttgttatatgtgatgaaagattttattaacttgttggtaaatctgtcgttttacagcagattttcctttaaaaaataaattacgaaacaatatcatagtgataacagatttgtttttagtaatgacaattttgttttttctgatcctaagcataacagatttaatcatgtaatattatggcagatatgtttattactagaataaccttttaagtgatggtagactttttgttgacagatttgttttccaaaatttgaaacatcacgttattgtagtcttatcattagtcccaagtaaagccttgatcaactaaaattatttcccggtttgagagcatgggtaaaccggtttgattacatttgtttacgacagacttataatttcttacggcagatttgtttattttatttccatatttgattttaatgcattaaattgacaataaagtgtatatctttctaaaatcaaaattttcggttttttttcttattctacacatcaactatttcaataagatcttttgattgcgtttccttttgtcaatttatatttttaatttatatttttaatataatcttaatttctatttttcaatttatattcttaatttatatttttcatatcaataagatccagttttttcgggatcttattcatttatattttttaatttattttattcataattcattttttttttgctaaaaatatggtattaaggttgattaaggttaattggtctttttacttaaaattggagtcattttagttaatcattgccaagaggagtcattttagttatttttgttaaaattagagtcaatctgagcaaatttcagtttaaattatttaaagccataaaagtgtgattggagcaaaaaaactgtgaaaactttaaaaactattgtaaaaccttaaaagcctcttccaatcacctccattgtattactaatttcaaaagtcttatttacagccttaatttttcttaaagccttgattacgtaccaatcgtattgtagcttttttttaaaacttttgtttttaaggcagtaatagagtaaattctcgaagccttatttttttggatgtagaaattttaatttattagataaatacaaaaaattgaaattatcaatataaatatataacaaataacaaagataagttctaaaaaaaactgataattattgaacctaaagaaaaaaagaaaagcaaatattataaatatacatcatacgtgagcttccaaaactcattactttgatacccaacaaatctaaaatctgtgtttccatagttcattaaaaatctttgaattagtaatacaaggcattttatttactataagaaaatcttttattacaactattatatttactaatccatcttttataaatatttaaagtaaaaaatttacagcaataattctacagcaagaaatgttacagctacagccaacaaagctacagcaaaaattctacagttacagcctaaccaatcacccactatatctttgagtatatattaaacttaacctttaccaaaaaaaaattttttgactatatatttcctgtaacaacttttgtgaatatttccttaccataaaagtaatgttatcgacatatatatggaaaattaatttatggtaaaaatcaaaataaactacaataggttaaaaattgaattttttttgcaaagagtcctataaataaagctttttgtaaagatttagagaaaataaattctttttttttcttttttttgaaaaagagactttactttttttcacaccaggggattaagagtaagaaaaataatgaatatcgcaaacatttatgtgatttttttcttgtagtggtactgacaaactcgttctctaactctgaggttttggctttacctggtatgttgttatcgtctaattagtttggtcattttgaaagtattattgaatgtttttatttttaaaaagaaaaaaatgtgaaaccattttaataaatatgcgtatatatatatatatatatatatatatatatatatatatatatatatactagaattatgcctctgctatgcagggataagttaaatgttaattaacaatatatagtaaaatattttaagaatatcaaacatatttattagtgttaaaatacaaaaaaggttgtatcattattacgtcaaaaaaaaatagaatagttggagaagaagaaacaattttctttttcaaacagtttttttttgtcacaattaggtgttaaagaaaataatttatttgaagaatgtagagatcatagggatgtggggaagacaaatagttttaaagattttttttttggtcgtgaataaatatgtacgaaagagaagaagaagtaaacgagtagaatttaagacttatgccacatatcaaatagagaatacatcaactattaataagaatggttgttgatttagtataattagatgttacttttggttgacataagttatcatgtgttatagtgatcgaaacagaaagaattgatatttgctttataccatgcacaagaaggtacggagattatgaatgttggtttgattgtacttacaataggtataaagaaggagggtgtgttgaagatgttgttgtaaaacataataggaaccgaccaacgtttcgagctgttgaattatgtttttttagcatcaaatttatgtatgatttttcaatgaaataaactagttttattatattgtcgcttctataactttaattacttgtcctgacgtttgtgtttataaatcaaactagtattaaattattttcgttgtaaatgcctaaattaaaatttaatgataagtattattaagaaaatattttactaacagttatatatcttttaattaaattttgtcagtaaaatatattatataaatatgaaatgattttcaaatacacattaaataaaataaaaaaatttattgtgcagagcccacaaatttggggtataggttattttctttctacagcaaaaaaagaaaaaaaaggattttgctttgaactaaataaactaggcatgtgagctggttaagaactcagaactacaacatgattggcttagatatagtgctctagaaaatatttttgctatgaagagaaacttgtaagattctttctacttaataaaaatctctttatttagttcaaaatcatcaacaatattacctaaattgttaccaaacacagctttgactataatatttgattgtatattttataatgtctatatgtgaatattttcttaccaccaaaataatattattagcaaatatgacagagttatttatggtaaaagtaaaaataaaatacagtattaggttgaaaattgagacttttctcagcaaataatcatataaataaagctttttcgtaaaagactaaaagatgtagaaaaatatatagacttcttcttttatcattttcttactccagagaattttacagtaagaaaaaaatgaatatcacaaaagcttatgtgatttttttccttgtagtgatattgacaaactcattgtccaactctgacgctttggcttcatcgggtatgttgttatattgtccaattatttttaaccattttaaaagtaattattgaatattttagtttttagaagaaaaaatctaccgattttaatgtatatgtattggtatattttacttttctttaacattttttgttttctctttcggacaacacttttctttaacataagttatatatgtgttacagtgattgagacaacaaaaaatgatgtatgctctacaccatgtacaataaggtacggaacatttgaatgctttcaggactgtatcctcgaccatttcagagatggaaattgtattaatggaagatgttgttgcaaatactgattgaaatcgatcaacaattcgaatggttgagttatattattctaaaatcagatttatgtatgtttttcaacgaaataaaactaattttattatattatcgattatgagaccttaattacttcgcgtttctgtttataatacaaactacaaaccaagaaaaatagagatggtaacaactctgaaataatcaactttgaatcatatggttaagtcatccaaatattcattactgcgtaaaatacttacccaacgagataaggacagtggagatgaaaactccaatcaccccaaaagacatgaataacatgatggttaaaaaagttgtgaaaacttacagaactctagtttctatagcctgcaaattaacaacaatttgtaacatgagaaagacatttgtaccatgaaaaatagattggtgaaggaaacacgccgatttggtgaaggaaaatgtccgatggggtgaagaaaagtcatgcattttcttaacattaatcggccattagatgtaccaaactcaccgatcgtaccccacgtcagtggagataatgatcacgccaaatcgaggattcagaggtcaaaagtttgtcattgtttgcttccgatgtcacgccaaataaaataaatcgttgcagggtcgccgagcttatataatacaaggtcggggcaggcagaaatcatgcacattagtagattagctagattataattttcttatttaaccaaacaatctagaagagtttcgctctctagtctgctgtcttacaagttataacataggtaagacaaaaagttggtttaaaatgtaagggtttcatattttaactggggaggatttttgttaaacgtctatagttatttgccaaactttacagtgtttatgcttaagctaaatggaaaactaatttggcatatctaaattactttggtctctactttatttatgataaaactaaagcatttttgggactttgtgaaacctcgatatttaaatggcattttcccttttctaaacatatatttgaagtatgacacaattttattttacatatatataatatgtcatttatcatttttttaagttataatccatttgagtcaaatctcatatcttattttaattttactaatggttttacagttagtaaaactaattaaaagggttttatgccaaaaaaactccaagtaattattttgttcaagttaacccttaaactcaaataaatgcaagtcaataccacaaaatcaaaatttatccgcaatatagctctcgaacgttatagattttgcaaaccgtataaaagttgtcaaaacgatgtcgttgaaataaagttgaaacttgcaagtaatagatttatacaatgtatatacaaatttatacggtttgcaaaatctatacatgcgggtgacttttgattttgtgatattgacttgtatttatttgagttagagggtgaacttgcaaaacataattacttagggggtgtattcaaattagaatttatagtgatttgagttttcttgagtttttaaatgattttgattattttaggaaagtttatatgattttagcaaaagtcattcaaatctcacctcaaaaaaataggatttagatttctgtatttttaactaaaaaaatcctctcaaatcctccaaaatcattaaaattcaaatctacaaatcgttttcaataacagtggattttaaggtggattttgaaatcattagttcaataacactgaatttcataagatttataagatttgaattagataagattagataagatttataaattctacacaaatctcttaaaattccactttcaatacacccttcttagagagttttgtttacacaaaaccctgaaattaataataagttatgaaactaaataaccatttgtgttattttattgggttgttgtgtatttatgtgcggtgtcacacacacaaaaaaaacccgaactcatttctcttatgggatatcaacaaagttataaatttataattctgcaaggaaattaattagagactttattagagaaactcatatacattgactacatgtattgtataataaaatggttacaagaaaaaaaaagtttgaccatatttcaataatctggtattaaaaatatagaatcataccatttatgcaaatatggtcaaagttttaacccaaaaattagtatatatgctaatgttgacccaaatattaacatataggtaattttatttcaattttctaatattaataatttaatatatgctctcaaatcttgcatttaatgtgatatacttatcatattaattgttaagattttttctacttaatggaaatctctctttgacaagctgattctccatttctttaatattccttttgttcaaaatcatcaataaaattatttaaattattaccaaaattatatttgaatgtatattaacattccatgatttggtaccatattatatagaatcatgccatacatgccaatctataactatatgttgatattttcttaccaccaaaataatgttatcaacaaatacggaaaattcatttatgttaaaaaaagagtaatctactatgttgaaaaactaagacttctctcaacaaagaattatataaatatagctttctgtaaaggcttagagaagtagaatttcttttctttttaaaataagactttttattttttgaaaaaattaacagcaaaaaaaaatgaatatcacaaaaagttatgtggtgattttttttctagtgatgttaacaaattcattgtccaactccgacattttggtttcatcaggtatgttgttactattcaatatctttgattattttaaaagtaactattgaatagtttactttttaaaatcgcttttaatgtatatgtttgcgtatttatattacttttctttaacataaattgtatatgtattgtagtgattgagacatcaaaatatgatgtgtgctttataccatgtacaagaaggtatgaagatcgggaatgtaatgatgactgtttggccaaggatttcaatgatggaggatgtgttgatggacgatgttgttgcaaatactgatagaaagcgatcatcattctagtaaactcgcgatttgagttgttgaattatgtttttctagtatcagatttatgtatgttcttcaataaaataaaattaactattatactattgcttctatgactttttttctttttcttctatgactttacttacttgtctggaaatttttgtttcttgttagtattatgcttgcgtaatgcaaatgtgaaaaaattaaaattatatatttatttacaaaataaactttatgggattgaattaattgcatataatcttagcttttacctcacgtttatttatagatcgattttgtgcatttatagtttgtaaccggatgcaatatgaggttcaaagtgacatcgcccatttagtaagcttgtttaatgattgtagaatgacttttatgtttatggacaaattgttagacataaaaaaaactaccatcaggtgatatataaaattgaaacaccacatacaaactctctcgggcacaaacatcgagacgctcccacaaaccatgctttccgacgctggcgaagcctctgcttgccggcgtcaggagtctccctccgtttgtctctgctgctttgttttcctctcttgttctttgtgtttttgggcgtcttctcaatcttcctgttccttcaaccgcatctctctgttccacggtgctccaatctctcgagacaaagttaggaagagctcgacattcctcctgatgttcgctctgctctcattatcttcctcaaagtggacaagtgagacctctttaccttccagtggtgtactgcttaataattccgggtttcgttttcttgcgttgcccaattattctagatctgtatccaatccgcctcatctagaagcccctccctattgatcatgttacatgacaagagctcaaccaccccatgcacatcatttggatcatgtttggctctgctccaagctatcggttagtttctgggggcaggtgattagtgagccgtcggcgccgggtgtacctccgtcttttcctgtgacggcgattggagaaaccctaatgttgctggaggctccctttactgggcctgaccctcttaaagcccatctcgattttgtgcataacttaaatggtggccaaactactctaaacgctcaagacaagcccatatgttttagtcttttggccaagaaaccattaatgcatcgacccttccctttgttagccaggtttgatctgaactcttattagtcctttcttagcaacattgtgtgtcgttttatgagtacaactgatcatggacatcatttggagcataatccaactcagttgctagtcgggtacaaagtcttttcgcgaaccttgcccttaaaatcacctaggcattttatccttgagtttagtagattgaagaagaacggcattatgatctcgcctctacggagcgaagattattgtagcttcttcaatccgctctttacctatactttgaatcgaatcgagctcccacttcaagattgctatttgagattgtcgaagacgcacgtctttaccacattttgtgcagaactcatatttggccttatgggtctttggcgcaaaagttgtcttaccttggagagattttcagatttgccatcctcttttttggagagaactgtttcaaattttttagttttctccaagtggttctcaccgggaatcattgaaactgaagaacatttatcaaagtcacgaattcttttgatagtgactatttttaagttccccaaattgttcgcggaagtgttgttgacacacgatggtctcgcttgtgatatgttgcgttgtagtctctgtctccgagttcttatggatctatcccctatgtttaatgctttcccaaccttcctagctactttggatgtaatcttgtgcttaatttgctttatgtatccaatctttatggttgatgatttgtactatgtatccttctttatttgatggatgagaagtggtttgacaaaaaaaaagaaaaaaaactatcatcaaaaggttgtagttcaaaaaatgtttcccaattaatagtatagatgttggtatcgtctacttagtttggtcatttcaaagtaattattgaatgttttaatttttaaaaaagaaaaaaatgtgaaaccatttttaatgaatatacgtatatatatatatgttacttttggttgacataagttatcatgttttacagtgatcgaaacataaaactgatatatgcttaataccatgtacaagaaggcgcggacattatgaatgttggtttgattgtactcacaagaggtataaagatggaaggtgttgtattaaaaaataatagaaaccgaccaaacgattcgagctgttgaattattattttttagcatcagatttatgtatgctttttcagtgaaaaaactaattttattatattgtcgcttctataactttaattacttgtcctgacgtttgtgtttataaatcaaaatagtattaaattatttttgttgtaaatgcctaaattaaaatttaatgttaaatgttattaagaaaatattttactaacggttatataccttgtaattgaattttgtcactaaaataaattatataatatgaaatgattttcaaatatatattaaataagataaaatattatattgtgtacagcctacaaatttggggtgtaggttattttctgtctacagcaaaaaaaaaaaaaggatttttgctgtgaactaaataaacaaggcctgtgagctggttaagaactcataactacaacatgattggattagttatagggctctagaaattatttttgctatgtagagaaacttgtaagattctttctacttaataaaaatctctttatttttagttcaaaatcattaacaacattacctaaattgttaccagacacatctttgaccgtaatatttgattgtatatttttataatgtctatatgtgaatattttcttaccaccaaaatattattattagcaaatatgacagacttatttatggtaaaactaaaaataaactattagcttgaaaattgaaacttttttcagcaaagaatcctataaataaagcttttcgtaagagatagagaaaaaatatagacttcttcttctcttttttttcttacaccaaagaattttacagtaagaaaaaacaaatgaatatcacaaaagcttatgtgatttttttccttgtagtgatattgacaaactcactgtccaactccgacgttttggcttcatcggatatgttattatattgtccaattatttttaattatttttaaagtaattattgaatattttactttttagaagaaaaaaatgtaccgattttaatgtatatgtgtttgtatattttacttttctttaacattttttttgttcttttggagaacacttttgtttaacataagttatatatgtgttacagtgattgagacaacaaaaaatgatgtatgctctacaccatgtacaataaggtacggaacatttgaatgctttcatgactgtatccttgagcattacagagatggaaattgtattaacggaagatgttgttgcaaataatgattgaaatcgatcaaaaattcgaacgattgaattatattattctaaaatcagatttatgtatgtttttcaatgaaataaaactaattttattatattatcgattctgtgaccttaattacttcgcgtttctgtttataatacaaactataaaccaacaaaaatagatatggtaacaactcttaaataatcaactttgaatcatgtgggcaagtcatccaaagattcattattgtgtaaaatacttacccaacgatataaggacagtggagatgaaaactccaatcaccccaaaagacatgaataacatgatggttaaaaaagttgtgaaaacttacagaactctagtttctatagcctgcaaattaacaacaatttgtaacatgagaaagacatttgtaccatgaaaaatagattggtgaaggaaacacgccgatttggtgaaggaaaatgtccgatggggtgaagaaaagtcatgcattttcttaacattaatcggccattagatgtaccaaactcaccgatcgtaccccacgtcagtggagataatgatcacgccaaatcgaggattcagaggtcaaaagtttgtcattgtttgcttccgatgtcagtgaaatctcaccagattttgcaatcgtcctgatgagagaaagagcgaaagagatgatgaaacaaccattagagaaaaacacgcgacagaagtttttcctttgcatctagtatgcttggttctaaggaaaaaaataatcgttgtagggtcgccgagcttatataatacaaggtcggggcaggcagaaatcatgcccattaatagattaggtagattataattttcttatttaactaaacaatatagaagagtttcgctctctcggctgctgtcttacaagttataacataggtaagacaagaagttggtttaaaatataagggtttcatattttaattggggaggatttttgttaaacgtctgtagttatttgccaaactttacagtgtttatgcttaagctaaatggaaaactaatatagcatatttaaattattttggtctctactttatttatgataaaactaaagtatttttgggactttgtgaaacctcgatatttaaatggtattttcccttttctaaaaatatatctgaagtatgacacaattttatttcacatatatataatatgtcatttatcattttttaagttataatcaattaatacgtatataatcaatttgagtcaaatctcatatcatattttaattttactaatggtattacagttaataaaattaattaaaagggttttatacaaaaaaacctccaagtaattattttgttcaagttaacccttatactcaaataaatacaagtcaataccacaaaatcaaaatttatccgcaatataactctcaaacgttatagatttcgcaaaccgtataaaagttgacaaaacgatgtcgttttaaacttttttctataaatgaaaaaagaaaataaagttgaaacttgatagtaatagatttatacaacgtatatacaaatttatacggtttcaaaatctatacatgcgggtgacttttgattttgtgatattgacttgtatttatttgagttagagggttaacttgcaaaacataattatttagggggtgtattcaaattagaatttatagtgatttgagttttcttgagtttttaaatgattttgatgattttaggaaagtttatatgattttagtaaaagtcattcaaatctcacctcaaaacaatgggatttggatttctgtatttttaactaagaaaatcctctcaaatctaaaatcattaaaattcaaatttacaaatcgttttcaataacagtggattttaaggtggattttgaaatcattagttcaataacactgaatttcatgagactttttaaaatatatatttgagtaacataagatttataaattctacacaaatctcttaaaattccactttcaatacaccccccttagagagttttgtttacataaaaccctgaaattaataataagttatgaaactaaataaccatttgtgttatttattgggttgttgtgtatttatgtgcggtgtcacacacacgaaaaaaaacagagctcatttctcttatgggatatcaacaaagttataaacttataattctgcaaggaaattaattagagactttatttgagaaacgcatatatactaattacatgtattgtataataaaatggttacatgaaaaaaacgtttgaccatatttcaataatctggcattaaaaatatagaatcataccatttatgcaaatatggtcttttgaccaaaattattatatatgctaatgttgacccaaatattaacatataggtaattccatttcaattttctaatagtaataatttaatatatgctctcaaatcttgcatttaatgtgatatacttatcatattaattgttaagattttttttacttaatagaaatctctcttggacaagcggattctccatttctttaatattccttttgttcaaaatcatcaataaaattatttaaattattaccaaaattatatttgaatgtatattaacattccatgatttggtaccatcttatatagaatctataactatatgttgatattttcttaccaccaaaataatgttatcagcaaatacggaaaattcatttatgttaaaaaaataagtagtcaactatgttgaaaaactaagacttctctcaacaaagaattatataaatatagctttctgtaaaggcttagagaaatagaaattattttcttttcaaaataagacttttttattttttataaaaaaattaacagcaagaagaaaatgaatatcacaaaacgttatgtagtgatttttttttctagtgatgttaacaaagtcattgtccaactccgacgttttggtttcatcaggtatgttgttactgttcaaattttttggtcattttaaaagtaactatttaatagtttactttttaaaaccgttttaatatatatgtttgcgtatatatattacttttctttaacataggttgtatatgtattgtagtgattgagacatcaaaaaatgatgtgtgctttataccatgtacaagaaggtacggagattgggaatgttatgatgactgtttgggcaagaatttcaatgatggaggatgtgttgatggacgatgttgttgcaaaaaatgatagaaagcgatcatcattctagtaaactcgcgatttgagtcgttgaattatgtttttctagtatcagatttatgtatgttcttcaataaaataaaattaactattatactatggcttctatgactttctttttcttttacttctatgactttacttacttgtctagacatttttgtttcttgttaaactagtatgaagcttgcgtaatgcaaatgtgaaaaaataaacttatatatatatttacaaaattaaaacttaatcaaaaatttgttatatatattagtatcaaaatagctaaaccaatccaactcaactcattacccaataaaatcttattttcgagacttataaccaatatttgatccaaatataatatttaaaccgattttataaatccaaaattcacaactcttctaaaaatctttgaatcactttctatgaagaacataaaccctacaagaatctaatatttaatctttgaacccttttctcatgtattgtcattggaataattaaattttaagaataaatacaattttttttttttattaattgtcattgacaattagagttgtttggattcgtaattataagttaatatacaaaaacagtataacaattaatgaaaattgtattttgtttttcagaaacatgtaattagttctttttatcaacttcaaaatatccttcgtttaatatacaagattattataattaaaaaaaaattataattctgccggattatagtgatggaaagaacaagagaaaaaaaaattagattaacaagaggatgacgtggcaacgatatcatcaaggatgtggcattcatttcaccagcgttatcaaggacatgacattcatgtcagcagtcatgtatgattttacaatgttgggtaagatcatgtatgcaatttgaattatctaatacattaggtatatattagcaccaaaaaactgtaaagtataaattgaacacttatactttggttggatatgaaaaaactgatttttcggtgaaagatgacaattgacaagcttcatgcgaaaattagatgattaaaaagaccatgatctaactatcatctagtttttgaacaaaattgactgacttgtcatcacttgtgtgccatgaaactttaggccctgaggagctgaacaccattgactatcaagatttcagaattagcacatcacttagagatagtgtagacgagaaatgtattttggcatctcatagttcaaaactgaaagtttcttggtgcgacgaggagggctaactaatttgcattatctaatatatatacttctttatttttacgtatttaatatttcaatctatcaaagaatgtactttgtgcattgaggggtagcgaaggctcatggttctcttttctgcaaaatgtctaccatagctgattgaaggaatctcgacacaaagccgaagaatgaaacttgatatctagtgttttttgttgttttaaaacctcttttctcttaggttttgttgctttgcattcatattttggcatatagtgttgcatttgcatttgcatttggttttcttaggtgcatgagtgcagtttagagttttggaagcaaatgaagcaaaaaaaggaactaagagaatgcaaagtgaccaaagaggagaagtgcaggacaacaaaccaagtggtcgatagcctggtcgattggtcaaggaccagagctacagaggaaatttgaatctatcaaagtggttgattatgtggtcgattggtcaaggactagagccacggaggaaatttgaatctaccaaagtggtcgattgcgtggtcgattggtcaaggattaatgctacgaacgatattcgaatctatcaagtgatctattgcttggtcgattgctttcttaaagcagctcaaaacccggtttgttccgggttgatccggtttatttcttcattactatataaatactcttaacctagttttagagaaatgagttttttgtttgagagataaaaacttctcttaaggttctttatcttaagctttttgtatgaatcttgggtactttttaaaaaaatttctcatctattttctaatgattatggctttacaaagatcaaaccaattcctttgtatgatcatgatcatgagtgagtagtcttttagagttctttggttatggtagattatgatgttttagatgttgagttatggagtttagggctagattacttaagatcctcatttattggttgctattaaggctagatcaaccttgatcatgttgatttagacactaggaattttaagcccgtaaggtggtcgatgaatttcccgaaccaaaatctttaagtgcttttcataccttacctttggaaattgttgattagagtgattagtggctagataaaattgttatttatgcttattgattgtttgattaataaatggattaatgtcatggaaatgtgttagtcttgcttagtgttctatggtctaaggatcattgcttgttagaagttttttgatgcttcataattcatctctttatcatttctaatcgattgccttaaccagagacttcgtctttagttatcacttagtaatttgttaatctcccacattgtttacttttgaaacttgttagtcttttgtttcttgctttcttttaccttgttttgcattgtttacttgatagtgcattgttactaagacttagaatactcaaaatcattttgttagcttagattaaacaattgtgtgtattcttgctgagttgattaattataaattctggttcgataaacaattgaataaaatgctacatcaaaactatttagtgcaaagacattattaactaattcgtcaacatttttatactagactttactttattcaataaattaaattcctatattcaaattaagactaaaatctgtgaaacacttattacaacttaggttaaagagataccaatgttaaatcaaaaacaaaaatatggaaataacctaaatgacaaaacaaatgatgaaactacaataaaaaaaaaacgaactcaatgcttgagaagagactcctgaatgcatactatacccgggccctccaaagaaaatgtaagtacccccatcatcactaaccatgtctttgatatcgtataatttagggttggttgcctttaattttacgtcttgagcgggctggaatatgttgttatctacgatctccaagttgcgcaagtagctaactttgccgaagctttcattggggaagtgaccggagcccatctgggttgtcgtatgtcggccggaactttgtgagttcacgatctcaccaccccattgcacctcgtctccataagctaaatttgtgaaaatctcggctggccagtatccaaccaatgaattgttggatcccacactcaaccaccagtttctgtgcttttgatcctacataatttgtttattaaaaatgatatgtaactatttatttgaaagtgtaaattttgttacataaatagaaaattcttttgataataaacaaactaaccttccatatggatacagtgatctcaaattggttgcctccgaatgctgagatgggagtaatggtgcctccaaaaacaatgttgtcactggtttgtataaaaccaggacactggagattgtagcatccagaaacattgtatccgtcactctggataaaatttcatattaattttattagttaacttatcaaaaccatattgtaaataattttaaattaagtatgtgaaaaaaaaaaaaaaactagataatatggtgtagtagcggaaactatataatgacttgaagaaaagaacttgctgagtactcttatgtcaactcgggtttaccgaacgattgtaggattgagcaagataaacaatttgagagtactcttctcaatgctaagcaagacaaaactttttgggtaattaaggttaccttttcggttatttatagattttcttcaaaaacaaaagtgattacaacaataattcgaccccaaatctgaagcttcattatcgccacaaaacagagaaaggtgcttgactttgaagacattagacatacacaaatcatcaaattaatgaacacgatacatattaggattgatatctcgagaacttccactaacccaatcttgcgagacttgagcttgttctattcacacaatgtcaatcaatctttggtgatcactaccaatacaagatcccttgaatctaaaaacacttctcatcgtttcttatttgcagcggctttgtatttgacaatcaagtcctcgaggttagcttgagattagaatgcaccgcttgtaagtcatccaagaagtctgtagcgtcgccatgatgacgagttatatccggccgagtcgtaaggtccaaagggccacacaaacaatgtcgtagacaacatgaaatgagttaaccctacaatataatcaaaggaccctcaaaaaagggtagacatggcagagggcaattctgaaggcgatctagggtttcagtatcatgtgtctcaatcaagtagatgcggcggatcggccgccgttttccccgatcatgttgcagacgttggcagaaaacattcagactaactctgaagcttcacctgaagtgttgcaaaaactattgtatgtatcaattgttcaaaatcgtccaactctttcgaaacatgatttcagtgtaaccatggaggatggtaatccgacagtccaagttccatatgaaatatttgaagattcaaatcctctatgggaagatctacttattggaaaattccaacaaaccgctccacatgttgcaaaggtccacgtcattatgaacaagatcttgcttctcggagataaaatagtgaagatagatgcttatttagttgatgccaaaacaatcaaatttagaatcagagacggttcagtaggagctaggattcttcatcagggtatgtggaacatagctgatatgcctatgattgtttctaaatgatctcaagtgatagaggaagctccgccagagattaaatcgatgcctatgtgggtatcacttcaaaatgttctgcacaccatgtatacctggaaggggttaagttttctcgcaagcccagtggagaaccaaaggagttgcatcaagatacatagctttgtaaaaattgaagaagctaaagtatttatagaggttgatctatcgaaggaactgccaaaacaatatcgcttcaagtctgcaaatggtattgatgcaatgattgtttacaaatatcctttgcttccgccaagatgtgctacatgttccaaatggggtcatccaaagaagtttgtctcgtaaaaacaactccaatacagattctaaagaaagttgttgatgaaaagcatgaggtaaatgacaaggaaaaaggaacatcggaatcttgaagtgtagaaaacggtgaaactaatccatagaatgttgattagagtgagaaggaacccactgctttgccacttgttcaggtacaacaagaagtttatgaagaggttattgttgaggtagctattaatgatggtataaatccaactgaaacttggacagaggtctcgccaacaaaattaggatgctcaagaattagttcacctcaaggaaaacagggatctctcgactctccatctcgcttatcaatattggctactaaagaggaaaatcaagaaactgaaaaccaaagaaggagaaattacgtcaaaagagaaaagagaggaaaatttggacactttgcaacttgtagataggcagggaagggaacacacccttcttttccaagagtttcaaagtcaatgcataaggtgataccagactataacgctcaacacaccaaggccattcctagtgtttcgagtaaaaggggtcgcaaccgaaaacattaaatgtcgagtttcttttggaatgttcgcggtctgtacaaatctgctaagcattccatcattcgcatattggtaaatagaagctcactatagtttggttgtcttttagagacgagggttaaggaaggtcgggcatctggtattatgtcatcaatttttaatgattggtcatctatgacaaattatgaatcacactggttagatcacattttgggtagtttgaagagaaagtgcgaggttgactcatgtattcaagagcagtcaaatgatcacttgttctgttttgttggacggtcgagaagatagatttttccgcaccttcgtttatgcatcatattttgtggaggaaagaaaaatactttgggaggatatatgttgtcaccatgattcaccattgtttagaaataaaccatggatgatttgcagagatttcaatgagatccttgatggggattagagatttcgaggatgttatacgatattgttccataactgatcttagatatcatggtcccttatttacatggtgtaacaagagggaggagggtcttatttgcaaaacattagaccgcattctggtgaatgaagaaaggtgtgatgtttttgcacattcttatagtgtatttgagtcggggggctgctcagatcacgctaggggtcggataaacctggaggctatggctcgaagtggttgcaaaccctttaaattcttaaatgtgctaacaaagattcccaagtttcaatctgtagtagaggaccagcggacaaacacaccgcccctgttttcttctactttgcactacatcgtttttcgaagaagttaaaggcattgaagccgagcttgcgatctctaagtaaagagaaactgcgggatcttccaaataggactcgtgaaacctatgataatcgcatccatcggcacaaacgatccaaaaagaatctatggctcacacgaattggcagtatctcgctgatttggaagaaggctatctcaagcagaaatctaagcttcactggatgaatgtatgtgaccagaacaactcatttgtccacaaagctgcaaatatccaaaaaatgcaaaactctatttgagaactcaaaggaccaaatggtgtagtttttgcagacgagtgaaggaataaaagaaaaggctgagagattctttaagttatttctcaatactccaccaaatgattttgaaggtatgacagtggaagctttgagaaatctcatgctattttgctgcctagaaacggaccaagcaatacttacacagacagttacaggggaagaaatacaaaaagttttgtttgcaatgccaaacaacaaagctccagggcctgaagtttacacaagggaatttttcaaagctactttgtctattgttggtaatgattttgtacatgcagttcattcattctttaccactggttttctcccaaaaggattaagtacgataatcttagcattaataccaaagaaagaagcagcagttgagatgaaagactatcttccgatctcgtgttgcaatgtggtttacaaggtaatttcaaagatccttgcaaatagactaaagtgtttactgccgagattcatttttcaaaaccaatcaactttttgttaaggaatgattgctgatggagaatgtactgttggtaacggaaatcgtctaagactatcataaagaatcgtctaagacatatctaaggcttttaattcagtgcaatgggatttcttgctgaacactgttgaggcactaaattttccgagtcaatttattcattggatcaaattatatatcaccacagccactttctctatacaagtgaatggtgagttgagtgagagggtgataagagagaattcttcgtggatttttttatatatatagtataaggccaaatgaaataaatttgggtttaaatgaagggttataggccaaatgcaaaaagttcaaaataaaaaatacttcatttttttaggtaggcaagatccaaatatccaaccggatatctttattaggattcggatccgcccacctaaatatcggtttttcggagcggatcccatatatatatatatatatatatatatatatgatatataaattatattatacattttaaacgaatgtatagtattattactttgaattgattaactttgaaatttcaaattaatataattaaagtattatttttgtggtttaaaccaaatgaaaaaataaaattgatagctaaatttttataaagcatatttaccgtccaatagatgaaaaatcttgtcttattgtcctgatacaaattcgggtaaacctaaaatgaaaatttcaaagtataaatgtattagtccattatatatatttccaacaaaataaataacaccataaattgtgcaaacctgcaaaccaacttcaatgctgttaagatccttagtctcgtagttgcccgacgtaatccaaatctgcgacaagctgaactcgtctcctgtttctacggttgggtcccaaatgcttattgtagcctttgctccgtacattttcggcaaggatttcgtagttacgatcgcatactgtttatcaattattattaatacagacaatacatatgtattttgaacggaaaaccaatgcatcagttaattcaattcatcaggccgacggaagaaaaaggaaaaaacgggtatagtatattccaggcccactctattggttggtagaagtggccaaggcctagaaatatttgtaagaaaggtccataaatcttttcttttttaaaaaaggccctataacatgtgagtcttattttagaaggcccctctctaatagttccaccaaaaaaatcgtatttattcatacataacaatttcgataacagtaaaaaaacagcagtgtacatatgaaatcgattcattgattaatatataaatatataatagtaatgaactatgagttttaactaatgagtttactgttttcttttaaacaattgtagtaccaaatgttttttaatcgatagaattttatcgtaaaattaacatataaactgagccgcggtataccgccggttaaatattttttatttatttttgacttttataaaatgaaaatttattgtgtattatgtttattgttatgtgttgattaataatttacgataaaattatgcacggcttttagtgagtcataagtttaagatattaataagtctaataaagttttctaggacttgacctgtggtacactacatgataatattttatgtttttattcataattttttgtattaaaattatataatttaactttttggtgtttttagatttaatcagtaaaacatatgtaatttagtaactttgtattacagatacatatttagatttgtcaaaaaagattaacactaattttgatatactataatgttgatttttattgggatatcttatattaatatcgatctaaactcgtctcatccaaacttattccgccatataaaccgtctcatccaaatccattctctcatataaacccgtctcatctaaaaaaatcccggtatagaaattcgtcctgtaataactaaacatcattttgttatttttctttaaataatatatttatttgaaatatatatatatatatatatatatatatatctagtcaatttaaacttctcaatctaactaattaaaatttagtgaaagacaaattaaatattacattttgagctactttgagactatcattaatttatgcaagatccagcataaattagacaagatccaacttattaattcggatcaaaaacaaataaaaatcaatcctattaaattctttaaaatgtatttcaaaaatgttaatataatatatcgtatatgtgtgataatacctcacgtggataagattcaccagtagaagtagaagtagaactagttgtttcgccattccgaattggaaccgttcctttgggacactgccaagtgctcatgtgggcttcccttgtttgccatttgcttttaattcttgttttgatcggctttggaattttggacggttgtttctgtagaaaaaaaagaattgaaaacaattataagctttagtcaaaaaatattatttaaatatcaaattttgattccaaaaaaaaaagacataagatgaacaaaatgatagacagataaataaataaaaacctgaattttgtggttttttaaaagatcgtgctgaaatgctggctggttatatatatcgacacattccacactttcttcatctgaggtctgtgaataaaaaacatatattagtagaactatttcagctcacaaacgatagaatacacataatacattaatggactctatatatacatatcccttcattttaacctaaattgaacttttatagtaaaggaaacagaaaccataagctcaacttttttttggttgttgattgctagatttattttagcttcttattagactgcaaaggcttctattttaagctgacattctatctaaaatgtgatgtgaattttgatgatctgaccttaaaaggatgcgtttaggcataatgtatcatccttctattttttcctcaaatttcagaatttgatataaaaaaattcctattgtaattaaaagactatatactagctaccaatttaaacatcattcttcaaattttttaacaatttcacctaattcttcaagtatacttaccttaacggtgaacgaaggagaccctatgacgagggataaaaaaatgatgatctgaagaaataccggcgagcgacccatagtagagtcaccggcgatcacttttggcgacgagaaataacaaaaggagtcgtcggagagaagtttgcggcagagctgagcagaggatgaagagtaagagccgttagaagaaactgtctaggttagtcgcctttatcgctaaagagtaagatcatctttgtttaatcttgtcttcttataaaactgaaaggagtcgctgcgatgtcaatgggcttgttagttttgttgttttttctccatttcaccatctctctcactctctctctctctcttaccagttttggttttttcagtccttttagggcaaagtaactgtgggtgtagattttagtacagactatactgtttattttttcatacgctaaaactataatgcttatttacaaaagaaacgaaatgattttgtttacatatgcaaatcgaaaataattaaatcttctgtaaaaatcaacgtttcatctccttgttatgacttatgagtttttttgtttttgtttttctgagttgactaaagaagaagaccatgccaagaagacagagaataggtccttgttcactttaacgacataacaaaaatattttcgaattttgtgaagttcttctattttaatacatgaactataaatagaaatattcattcttttcatgattttggaacatttcgaaaatagaaatctgcggacagtctatcttctattatttggtggagctttatttctctgaataccatattttccttttgtttgaataggttaataattagcaaatatggtaaatttgcaagttagtattaatgttaaagttacgtactacaagattaagaaaattgttcttctcactaatatatcattttatttgattgacgatataattaaattaaacttttccaaaaccattaaacactgaatttaaagctaaatttttcaacaaaacttaattaagacttatatttgatctactatatactgtaacttcatacctatttgatcatgtttcaaagtgcaaaacaaatcgtagtcgtttaggaaaacatctaaatttgatcgtcatgattgattgtgtaatacactaaagatatctactgaaagtctaaaacgaaatacttaactgtgatatacatttactaatttacctgtataaaaatgggtgttattaaatcttgataatgtggcgacaaaagagggagggaaggtagggcctaatggtgaaaacgaaatattgaaagagacaaagtaatcaatattctttttaaaacacttgatgcagtgatgcatagtattccttaatgagtatatcattttgcacaacatacaaaacatatcgcttcaaaaaatacagtcatatctcaaaaatatacgttaacaacaaaaagaagtgttgaacaaaaataattcttaaaactatataaacgggacgatgttttcatctctggtcatatttgttgtacttcatttgtattttttagctgtatttctttttaagcttggtctgtcgtagatactcgtcaatcagtttgcgtatgattgttaaatatctcatgcataattttctttttttcatctaaaaatacttcatttatataaatcagtgtatacaaaattatcaacgagattacagatataaccaatggtttatgtaacgaagaaacgataaagtttattacgctccgctttcttagtcaagtacttaatcgtcttcataatttccgtcaatttggtgtgactttcttgcttgggaatcatcttctttttacagatgaaatactggtaacgcatacggaaatcataggcagcgatccatccgttacatcacaaaaccttcgaattgatcgaaactcttatatagaaagagatgtcattgatcttggttttccttaaaccccatttttgttgatatggtataaaccatcttctgattctcctattagcctccaattactcctcaacatattgcttgttgggaccaagagagaacgttatcatcatcaaccatctacaagtctagttcatctccactgccttgttattaaaattccttatgtcgaggccatgagagatcgtttccaccgtcttcctctttgcaggagagaactcttccatcgtcaccaccttccttaaagttttagcttttatgtcattgcatcggtgttgcaagttcaacccctgtttgtgaaggatggtttacagaggcttttttctatgttcttttcaaaggttcagcaatttggtgttttgttgcctttgtttcagtaaccgatttcaagattgctttctctgccctagttgtagtttcaagctcgaacgatagatcactatgtgtgctctttgttccacaaggcgtctttccatttcttgtttctaatgttatcaaggttcatggaatctgcagcgatgttgattgcttgagtgttaggattgttcttgcctatcttttatcttctgcttatgtattatttgcttggcgtttgctttcgtacttcggatgggtccgtttgcgactctttcttttgaaatcatttaagtttaatgaagaatttgtgtagacaaaaaaaaaaacaaattgttggggtaaaaaaagaagccattttcccacttcaatctaaaccctttatggtagataaataaatataaaatttaaatttaaattttgttgaattgtaaaatgtaaaaatcatatataatatcatatagaaagcttttaaaaatttatttataatattattatacataaatccattcaatcaagtctatagatatatatttacttttgaaatattttatgtgccggtccaaacccagccaaactaatctccaaaaatcctttaactaggatttaatctgaaagatctaaataaattggtttgaatgtatatatttaagtctatttctaatgttttcaatgctactccggttagcccacatactttggccttaattaattcacatgtttatgtattaccaacctgagtacccgaaaaaaagaaactttgaccatatttcaatgactgtatatatctttgactgtatattcccgtatatttcctataaggctataacaactacatatggaaatttcatttatggtaaaaataaaaataagtaactaggttaaaaagtgagacttttttctaaggagtcctatatatatagctttttatacaaatttagagaagtagacttttctcttctagtatttgaaaaagagacttgctttctttttaaaactcaaagaggattaagaaatgaaaatgaatatcacaaaatcttatgtgattctttttctggtagttgtaatgacgaactcattgtctaactctgaggttttggttgcaccgggtatgttgttatcgtccaattattttggtcattttcaaagtaatttttattgaatattttatttatttattaagtaaaaaaatgtaaaaccatttttaatgaatatgtgtgcagtgcatatatatttacttttgtttaacataagttgttatgtgttacagtgatcgaaacagcacaaaatgatgtttgctttgtaccatgtacaagtaggtacggacattatgaatgtgcgtttgattgtatgcacaaaaggtacaaggatggagggtgtgttcatggtcgatgttgttgtaaaacataatataaaccgatcagcgatttgagattttgaattatatatctttagcatctgatttatgtatgcttttctaagaaataaaactaattttattatattgttgtttctataactttagttacttgtacacgcgtttgtatttagataaaactacttaagttaaaactaaatataaaatgttattaagaatatatcttaataaattgtattactaataaaatttatgaaattcatagcccacaaatttggggtgtagattgatcgtatgcacaagatggtcgatgttgttgtaaaatttatgacaaacgtatactaaggcgatatgtattatattattaacccggccggttaccaaaaaaataactttgaccgtatttcagtgatttcgcaccaataaatacaaaatcttaccatacattgcaaatatacatatatatatattgacccaaaagtttacataaatataaatgtcaattgttttactttaatttctgcactgatttgttaatcagataaactgaatgatattgattgtaaggttcttactacttaatgaaaataaatatcttttctctaaaatcatcaataacattacctaattagctaccaaaaaaactttgactgtaaatatttgactttatcctacaataattatatgtgaataattttattttatttttgtcaacatatgtgaataacttttaccatcaaaataatattattaatgtgtatggaagattcatttacggtaaaactaggcctctacataaaatctaaaatctgaaaccaaacaaaaaatgaatcaaatagtcataaaattcataacggattttaaatactgtatgtctatccgatatcttaaccaggaccaaacccgatctaaaacaaaaaaaaaaaactgaaaaagatatcaaaaatgaaagtatatattcaaaacattagttgtatttatttataattttatatccaaagtaccaacctaaatatctgaaaagttttagttatctttaaattaaaagatcttagcatattctcatcttacaagaaagctttgttttctaagcaaacatagtaattcactagaaaccttcttagatccacaaaatgtctccctattgtagcccatttcttgaatttgaatccaaagagatgttgtggtcgtctttttttccgtcttgtaagccctcgcaatattggaagtcgaaccaacctttaagaacaacttcagaacagcctacacatatgacaaagaagaacaatacctaaactaacgaaaacagagccgatgaacccagattgtcgaaaccaagacgagatctgcaaacttcgaagaacagagatgaagtgaaccaaaaatactttgtgttcccaaaaatcaaacctaaccgatttgaactagatacctatctgaaccaaaaccaaaccaaataatcataaaattcaaacagatactaaactctcctatctaattaggtatgaccaaaatctaaatgtaaccatattttggatcgtaaccagatcgtttttaaactgtacatgtataaaatggttaataacgtaactgttaaaatagattcgatacagttaaaaactatactaacaataaccgttatttaaccgtaactgtatcaaaaccgttagttaacaatatggttaactacgtgattaagcgtatttaaaaccttaaaaatgtagtcgtaaccaatcttttaagttaaaacctagaagtacggttaacttcatttttctaatcgatatagtatttttgcaacagtttttgtcgggttgggaaaaatgcatttgagtcaattttgtattcatccatttaataattttcttcattaaatcttagttgggttggttcaaataaaagaacattctagatccatttttaaaactcttacaccggctatgtctatatttaacaatataaatatttagaaatcggtcaagatttaaaattatgaatctcttatcatctttgtttgattttttaccggttttaaatcatcatataatatataaagttaaaaagtcacaattttagaaacagatatatatatatatatatatattacccaattgataaaaaatgtgtgagtttaacgtcacacatcggctaaatgttgagacaatgattcagaattatatcgtaaatgatcatcataaataaaataaattgattttttggcaggacttgtttaacgggatggatttttgaatcaacatcgaaaaacaaataaaatattattaatttgttgcttcgatacaggttaaatctgtataatttagagaagattgtataaagaaaaattctttctaatgcccttttcatgatgccccttttaaactctacccttttgttttatccattttcatttctaccctctttaaatttttaatgaccattttacccctatttgaaaattgttttaggttaacaaaatgaaatattaatcgttttcgcctaaaatattccaaaacaaatttcccgccaaaatttttcgaaaaaacaaatttcccgccaaaattattttttcaaaaataaattcccgcagaacaaactttttcgcgggaaaaatatttacaagggattttaaaatgattttaaaatatttacaaggaattttaaaaggaagacttacaatggattttaaaaggtttataaaagatttacaagggatttgaaaagagttttaaaagatttacaagaaattttaaaaaggttttataagatttgcaagggattttaaagggatttaaaagatttacaaaagttttttaaaggtttaaaattgttttaaaaggattttaaaatatttacaagggattttaaaagggttttaaaatatttacaagggattttaaaagggttttaaaatatttacatatgttttttaaagttttttaaagggtttaaaagtgttttgcaagatttacaagagattttaaaagggttttaagagatttacaagagatttttaaagggtttaaatggagtttaaaggatgtacaagggtttttaaaagatttttgaaaaagttacaagaagatcctttaaaaaatcatgtaaatctttttaaaaccttttaaaatcccttgtaaatcttttaaaatccttttaaaatctcttgtaaatgtttaaaaacccttttaaaatctcttgtaaatctatttcccgccaaaaaaaaattacaatgatttttaaaagtattttttggctgagaaaaaatttgttacgaaaaaaaatttggcgggaattttttttttgccaggaaaaaagtttggcaaaaattttttttttggcggaaaaatttcagtttccaattacatgtttctattagatgagggtaatttggtcattttgttcaagagaaagggtatttttaaaaattgacaacataaaagggtattgttgcaaatgagtagtaaaaaatgagtagctttgcaaatcaaaacaaataaaacgtttcatggtataatgttatttaataacaattgtaagccatacaatataaatgtctaagagaaaacactatacagtttccaaagttttatctataataaatagtcattaaatttagaaaacactattgttagaaaataaatcatgggacgggttaaaaattataggacatgttatattttggtacatgattatgtagtggatgggtttgaatgaatatttataaatattttaaataatattagcttgccattttgatacagttaaaatcttcagtttattaacaattatctcgtggaatcgtgggatacagttacttaataacaattgtaaactataaaatataaatatttaataaataaatataatttgtaagcttttatatatactaattttacaaaataaattgtctcctagtataccgcgggctaaaatctagttacaaagttatttcactaaaacagtacattgcttaaattatttaatgtgccactacttttttccataaatcaaacaataagaagtttatataattattatttctcctcttataatcgtttcttaatgctcacaacatcctttctttagtattatttttgtttggaatacatattgttaataactcaatcattataattgtgaccattaatttaattatttgtacttttattttaagaaaaaacaaattgctcatttcctatagatatttgaaacacataatcacgtaaaataaatattatttgatatattattatttatttattttattataaaagttaagaaaatataattgtttgcctcatatattaactatatcataattgtaactgtaactgtaaccgtatatacaacagttaagaaaatttataactgcaatcggtgattaataaaccgtaatcgaggtcatgcctaatctaaattactcaaattcaagaaaaacccccaaccgtattcgatccaaaacctgaatgtctatacctaaacaaaattaaaaataaataaataagtttaaaatttagacttttctagacaaaaatcgtataaatatagctttccataaaaatttagaaaagtgacttcttttttgtttttcttacaccagagaatttacagtaagaaaaatagaaaatgaatatcacaaaagcttatgtgatatttttccttgtattcatactaacaaattcattgtccaacgttctggcttcatcaggtttgttgttttttttctaattattttaaagtcattctgaagcaattattgaatattttagttttcctatccaaaattgtaaaaccgatttaatgtatgtgtttgtagattttacttttctttaatatatgatttaaaccatgtacaagaaggtacggaacatttgaaaatgttttcatgactgtttcctcaaaggatacaaagatggaaattgtgttgctggacgatgttgttgcaaaaatttatagaaatcgatcagcttttgtaccattgaattatgttttcttatcatcagatttatgcatgctcttcaatgaaataaatacaattaatgttgataactatatgatgcttagttagttgtgtttgtgtttataaaacaaacttgtattaagtttgtgctatgcaaatgcccaaaattgaaaatttacaaaacttaatagaaatttgtattctaacttttttttttttttaaagagccaattttataactctataaccagcgagagagaaatgggcaggtgtgcagtgtttcaggttggtatcttaatgtgtaatgagtcattcgaaaggtttcttgtttcaatggcatctactagcttttcttatactttttgaggtttttggtgtcggatcaatatcatagagcatttctattaattaagggtaaaacctaccgattaaaatcatttttaaaaaagtatgaaaaagaaggtatgagaagtttttgtttaaaatatatcatcagttcttaacaaaaaatcttacacatgtcatttacttagcggtttagttgttaagactgatggaggttctctaagtaaggcattggaatgcgttcgatttttggtttttctttggctaggttgcggtcggtattctgttgtaggtagttgagattttatatcaactcattagggttatagatgatttagtatattgcccccttgctaagttatctgtaggattcttcatcttggttgttcttaatgctagttttagattgatcacctagaacttgatttcaggtaataggtatacccaccataagtatcttttaccagaactactatttaacgagcctagtttataggtgtgtaataagaattggcctatctactaaagtaaatttatcaaactcgtttaacaagcatatttaggtataagatttcacagcacatcaccgaaaagcttagctctaggcatagtgagtttcacggaacatcaccggttattcaataattagagtttgagtttaaaaacggtttgataacaacctacctatttctagatatactaatcatatgtttccttagaataccctaaacatgacgttttattatattttattttacatctatctcataatctattttttgctttttgttttattttattttcttacttatttgtttagcttaattcgaaaccattagtctattgtgtgatccgagggttttgtggaattcgatcttaacgtactactatcgatttcttatttgagagagtggtcttacaattaatttgacctatgtggtcggtattctgttgtgggtagttgagattttaataacttcacagtctgaacattaaaaaatatgaatttcaagggttcagaggatggattgccaattttgagtactcatgttttcggcatatatgagaagaattgacgtgtcatctttcatgaatcaaggtctggtatggcctgtattgacgttataagggctggttctttattggtaggttctcatcccttacacgaattttcagagccttatttgtttttcgaagaagaaaatttaagtagagggtttggttctacgttttcgaaacgtacatatttatatctgaagtttgatacaaattttgttttacatactcatatcatatatattgtttttatatgcatattacttctctcttctttttgaagtcataaatcaaatatacatatatatataaggtgataggttatgaaacaaaatacaattaatgttatttttttaatggttggttatgtgtgataaccaaatttactaatacaattaagatatagcacctaatttaaaaagttaagagactgacacgaggggttgatgaaaattaccattttcgtgtttgttttttcttaatgaaatgtgaaattgattaatcaacttaaactatacacaaagtgtttaatcatgtaaaaacagagttcttatagtgagaagggagaatactaatgggccaacatagttacaaaactttactctactcaataaaattaaatctataacctttgtaacatttattttacattttagagttaaaatcgaaaataaaatatggaaataactaaataataatgaaaatgatgaaactaaagtaaaaaataagcgaactcaatgctagaaaagagactcctgaatgcatatggtctggccctccatacaaaatgtaactaccccaatcatctctaaacatcgctctgatgttgtagaacttagggtcgtctactagtactcctacatcacgaacggacttgaatctgttgttatcgacaatctccaaattgtgaaagtagctaacttttctgaagcctccgtcggagaagcgaccagatcccatttgtgttgttgtgtgtcggccaagactttgtgaattcacgacctcaccaccccattgcacgtcgtctgcataagctaaatttgggaaaattgtacctggccaatatccaaccaatgaatggttggatcccaaactcagccaccagttttcggactcttgatcctacataattatttataaataacgatatttaatttttaattttgaaatgtaaaatttgttacgttaaaataaaagtttttaacagcaaactaactaactttccatactgatacagtgatctcaaattgtttaccctcgaatgtagagacaggagtaatggtgcctccaagaataatggtgttacttgtttgtatgaaccacgacactgaaggttgtagcatccggttacattgtaggtgtcgctctgaataaaagtttatattatttttgtaagtaaacttatcgaagtcatgttattgtacatggttttaaattaagtatttcaaaataagcaatgcactaaaactctttactatatatgcattaaaagtgaaactacgtaaaatttaatatgatatttaaaaaatttcttttagaattaatactagcaaatgaaaatttaatctgattagaaattgagagtgtaattgttaaggatgagagttactatttgcattcaagctatgtaatatatacctctaaatagaaggactagttgagaaaattattctttgattgtcttttggtaaactctatatggaataactaaaatcgtaattctgataacttaaatcaagagattacacttaattgagtaattaaactttcaagtttgaaaaccaaaactaccgttcaaatcatattttaagatattcgaatatgtttgatattttgtattcactatatgtctatattgtcggatcggatctctatttcttttacagtagttttatgcacatttttccttttaaattcgactagatttcattaaaacaaagggactggatttatgtgcagatacaataatagtgtttgtatataaaaattatatttctcctttaaaacgaaggttagtattacttcatactagttaatttttaaacaattctaaaaaataacttaacattttagattaatggtcttaatagtaataataatccttatttttattgtaagacatatgagataaaatgaatcaactttttttatgaaccacacttagttacttattgtcttgacttattgtcttgatacaaatccggtgaaacctaaaaaataaaaaaaataaatagtataaaatgtattagtcattatgtatatattaaaaaacaaaaagtaataataacaccataaatttgaaacatacatgccaaccaacttcaatgctgttaagatcgttcctgtcgtaacttcccgaagtaatccaaatttgtgacaagctaaactcgccttctgcttctacggttgggttctacacattcatcgtagcctttgctccatacattttcggatgagtttctgtctttacgaccgcatgctgttatttttcaagttataatgtcaattactaaaacagacaataaatatgatgtttgtaaaataggtatgcttctatcagtcacatatgtaattgtttaaatattataagattttcgcacatgtttaatttaaaaattgtagcagtgattcttctaaccttaattttactttctaacaataataatcaaataaaaacttatatttaacaataataataaaataaaaacttatatttaccagtaaaggttagtgtatactgtataggttacgcaagttttatccttaataataaaatcttataagggtacactctgaactatgaagcaatacacgcagatttttttttgtttttttttgttaaaacgccttcttagttacgttcttatacacaaaatttaaaacatctaactttttcaaagaaaaaaaaaaacctaaaacatttatcaattaaaaacggaatcaatatataaacagttatgatatttaaacagaaaaagaatttatataaccatataatttaagacaaaaccataaatattaataaataaatttttatatttaattacatatttatttacaaacaaaagtgattactaccacatttcgtgtatcgtagtcattaatttgtattttagacatgagattcaatggattatttccaggctgatgtaagaaaaaggtatatatataatatattcaggcccagtctagtcgttggtaaaagtggacaaggcccataaatatttgtagaaaattttcgttaatattttccttaatgtaatggatttactaattactatataaactataacaatgaaaccatatgtaggttggtaatcaagtgttttcttaaaacaatagattttgtgtttttatcaaataaaaaaacgttagaatttgttgtcattaaccatgtatatgataaattgataatacctcgtgtcgataagttttcaccggtagaagtagaactagtcgtttcgtcattccgaactggaaccgttcctgctgggcactgccaagtgctcacgtgggcttcccatgatttccatttgcttttcttttttatttcgagcggttttggaaattcggatggtcgttcctgtataaaaagaagtttttgattattaatatcctatataaactgattatcaacacataagacaattgataattgaataaaatgataaacattttaaagaaacctggattttgtggttttttaaaagatcatgataaaatgctttctggtcatatatatcaacgcagtcgactttttcttcatctgaggtctgtaacaaaaaaacagacaaatatattaatgtatgacttctaaataacctcatcaattggactatatatatatatatatatatgtatccattcactttaacctaaatttgagtcgccgaaacagaacctcttagtcttatgctaaactaaagaccgctcatttgtttttttggttcttcatcgctagattttagtgtcttattagactccaaagacttctcttttgagctgactttctagctaaaagtatgatctttagtgcaattaaccttcagaggatgcgtttaagcattacacaattctgcggaatatttaaaattctttaatttccaatccttctatttatccatcggaatttttttatattagctaattccaaaatttgtgttttgaagaagtaggtatttgtaccttaatggtgatgaacgaattcgaaggggaaactatcacgaggcctagaaaaaagatcatccatagcatcatcagcaagagctccattgtagaactctttttctgtgtcacgcttcctctctcacctttgatatctttgtgtctctctctccggcgatctatctcttttaccggccggcgatctttctcactagcgatatctctcactctctccgtttcttagtcgaacccacacacctctctctctctcaatagattcatctttttctagctcagccattgatcagtctctctcttcacctccttcttaatttagttgtgtttctatttttcagcatgtctcgttcgcttcccagttttgttttttcagaccttttagggcaaaataagtgtggttattaggttgtagatattttagtagagactactgctaattttttcatacgataaaattataatgcttgtttatagaagaaaaacgattttgtttatatatgaaaatctaaaatattaaaatctcctgtgaaaatcaacatttttgaccttctcgattttaattatgatcattcatagttaataaattgttatgagtttcttttttttttatgagttgactaaagaatgagaacaccatgttcgctttaacgacataacaaaaatgttttctgaaatttgtgacgttcttatattcaatacatggactataaatagaaatattcattcttttcataattttggaacatttcgaaaatagaaacctgcggacactctgtcttctattatttggtggagcctatatttctgtgaataccattttttctttttgtttgagtaggttaattagcaaatgctacattttgcaaattagtattgttaacgttacgtactgcaagattaagaacattgtttttgtaactagctaatagatattttattttattttattttaacaatataaattaaacttttccaaagcaattaaacactgactttaacaaaatcaaacttctccaaagaacattgtttttgtaactagctaatagatattcatacctatttcatcgatcgtatttcaaagtgcacaaatttcctagccgtttaggaaaacatccaaattttgatcacgatgaactgattgtgtaatattaaattcttaaattttaatttatttttttagtgtatgactaaaaatatctaccgaaagtctgaaactaaatacttaaatgtgatttacaacattaactaagtttttttgacagaaaactgaaaaattaaattcggtggttcgctatacaatttcttttaacaaaactttcttagattatatttagtccacaatatgatataacatgtttactaaaaatactgtgattaagtttaacaaacattatacaaatttttgtttttggaatatatatacaacaggaattaaatttgtcaacaaaaactttaagacttattaagataattatatactttaaacaatatacttcccagttaaactaaaacaatgtacttcccagttaaactaaaattgagtaataataaatatgcatgataattactaaaattgaagttagcattactaaaattgagtaataataaatgataaataagcattaaacaaaaactaaaattgagtaataataaatagtaatagttaaactaaaacatttccacagcttcgtccacttttccatgaaactaaagacaattatctgttatttgtttttaagtatatttattactattactcaattttaggataaaactagattttaaaaataaatgttaaaataaaaggttgaaaggaatgggaaaaaggtggtccacactccagacagtaatggtattaagttttgagaatgtggcaacaaaagagggagaaaaggtagggagggcctaatggcaaaaacataaaaatgaaagagacaaagcaatcaatattcaaaaaaaaaaaacacctgatgcatagtactccttaatgagtatatcattatccctttaacgaaacctctcagacaccattatcgaggtcgcatcgaaatttaacttctccggcgccggtagagcctttgctcgccggcgtcgggactcctctcttcctttacgctatcgtttcaaaaaaactgttgttgggctctatttttctcctgttctccgtaaactctcccacatatccaaagttatctcgggtttttcggtcgagatcttgctcacgttttccttaagatccgttaccccgaaaaccttcgcgattctcgtcgttcgtcctacttgtcgtctcccctcgaagtcaaaaccagcacctcctgactcctcgccgtgggattcaaatcccaccactaagttctttgcttggatgttgcgggaccagagctctgcattgacgctggagtcgaaaaagcaaaagacggcggaagaatcattcacagcagctcgatcatcatctttagaagctccaaccctactagatcttgccacagaatttcaatctatgttgaccggaattgtttcgccgcctcagattgggaggaagacaaaggtaaagctgcttaacctaatcatgctgaatgtctctcagtttgggccaggcccaagagtgctctacatcccctgcagcccattagacattctgtctcagcccaacaggaaagtcttcggcagaagcccaactttcataaggcccaggtctgttctttttttcttattggcaagacaacgtttgacgatctcttactcggtaacagagggtaatggacgccttcttagttttgtagtgagagagttaggttggtcttgtctttccttttcataaaacctggtggttactttaactcggtggttagtttaactcggtggataatcgttcttaatcattccgtctcaagcataagggacgatgcatctcaactctctcgaacatttctggagaaacggccttggtatgtgcaacttaactctttctcaagcccttatacttcaatgatggatggtagtctttcgattggccatggacaccaatctagcttcgcatctttcatttggttatggcattgtgattatctatggcgtttcccacaaaccttcttcaccctttggccattaattccatcgaaatcctatttagaacttttcaaaagctcttatgcgtcgaccgcacgagccttcattgaccaccagctggtccgggaatcctcgaagctcgtcttcaaccatgtttacctcttggtttcaacagattctccaagtcttgcaagcttcttaaagccgatcacaactttggaaaactcatggaacccttatctttatgttccttataatgttttacttttagtttgtatgaattctcctcctttgaagttttaatgaatgaaagtattttgcccaaaaaaaaaaaaaaaaaatgagtatatcattttgtacaaattccaaaaacatattgttttaaagaaaaactaatagtcatatctgaaaaaatactttaacaatagtttacgtatgaatgtatgattgttaaatatctcatgtatagtttatatttatatttttgtctatattaaaaaatattcacatcaataaataagaaactataatcttcaataattcctatgatacttttcttcaaagcaatcataaatctatttgatataaaattcaccaaatataaaataaatacatataaaataataagtctatatttaaaaaattaaaaattataaacactaacccgtccaaacaaaaaactcttcgaacttcaaaaaataaaatgggttgactcttgctcttgtaattataagttgttaattaggctttattattaaatatttaattttatttttaaataaatcttaaataaaataaaagattttatcgggctgtaaaaaacaagacggaaaattaaaaactcagaactattaattgtaagaattattaatgaaatctttatttgacaatgatattacttgtatctatattaatatttttgaagtatattttaagtaattcaatctggtcgatttgtttttaattgatttaggtatctcctctacttgcgcagttgctgaagccctctcaatgcaccgtcgtcattgtcataggtctgttttgctcaaccagattgaggatgaattagagtccctaaactcacgttctactcattccgggaaggacgtttctctttggaaaagaaacaatggcactttcaagaatgttttcatctcaagtgaaacttggcatgagatacgacaacctaatccaatatgtgaatggtacaaaggtgtatggtttcccaaatctacacctaagtactctttcataacatggatcgcagttcataatctcttagcgactggtgacagaatgctcaaatggaatgctgccgtaagtggtaactgtgtcttgtgtgatgaggatatcgaaacaagggaccatctcttcttctcttgttcatattcgcctcaggtttggtccgctctcacccgaaacttgcttggacaacactacacaactcattgggagtctctgatttccattcttatggctttaccaactccaaagctccatctctttgtcttgcgttatgtgtttcagttatctatccatagtgtatggcgggaacgaaatgggaggaaacatggggaaccactaactccacccaacatgctagcaaaaatggtcgataaaaatgtctgaaaccggcttagtaccttgctggactcccctgcatacgaaggcgggctacgatattggttccatactcatccgcactaactatttttcagttgttcgtctttaatttttattctcaaaccttcagcttgatgttgcatttattgtaaaactgtcttttttggtgaataaatttaacattcataccaaaaaaaaaaaaaacatgttcacatgtatagtggtttgagtgatataagtatcaaaagaaaatcactaagggagagaggctaaacttaggaagtaaggaagaagaaaagatgcggtagtgaatggaagtagagtttgggggtcaatatagggttctgggagcatcgggttgtcaccattcttggaaattgcaataagtgtgaggagcaaagaatactcacgaggatcaaacaaagtggacgtaattaatcttgatcaagtcaatggagaacatcttgtcaattttcaataatgcttagccacttttgtggttagtgaaccgctaaacgtgttgcataccatctccatttgtctccgaaatccacacgaccggggtcatcgttaggctacctatttgcatataagttgatgctgcctcaataatcggattgggaactactggaaacatcttcgtgtgaagatcaaaagcaaccaacttagtcttctctggcctgaaccaataaagccatccgtttgcaaaagttggtacttgaacgttttgtgtccattgaaaaggaggaggaagcggagtcacctgcctccatcgcttgacacgaaaatcgaaatcctcccgcgatgaggtgtagttgtcgttattcttatgtaactagactagtcttttccaaatcctgggagagagaactctacgttgtcctaggatctaaataatgcttcttctccatcgattataggattgtctctgtgtctccttataaacgaacacatgatatgtctaaccttcttgaaataaaagaaatgtagttttggtttagaaaaaaaatgtcgtggatcccaaagactacatactcaaatcagacaaagacctattatatacacatattaaagacctagaaaaaaaaaatatattgattactgctgcctcagttggtcaaacttctctgatatcaacaaaaggttttcctctatagctttgtagtttatgaatgaatcttatcagttgagtcaaccaaatataacacctgttattcaaacatataaatatcagatataaagcacaaatccacaatctttttatgaagatgaaatggatattaagggtaaaccttagtagtttgtggcactttctccaagaaataagagtagtcacttttgagaaggtagtaaatactcgtttggctctctcccatatgatcgatgtattcatccaagcttgtcaattcttcactctttgaaaaaaagaatctgagcagtggcattatgagtctatggttatcgatatcttcttcaatgcaaccccattttaggaatctgccataattgtagtaaaaattcttgtaaccctggccatcaatccccacagaaatgtcagactttatcagcttcaatccccacataaatgtcaagaatttatcagcttaagaaaacaaaaactagtaaaggtaaatgatctacggacctctttgtcttcactttgagagatctcttggatcaagtcaaaagtttttctttgagcctctttacgattctgcagatttttgagctttcatgtagagtttcacaggaatcaccaaaaggaacatcagtccaccacaaccctcataaagctaaagtaccttggacctgcaaaagattgcgagacaagttaaaacaagaatggaaatatatatactttaaaagagactgtacaatacaaaaacatgaactcaccatctcaaaatcagaggcaaacacacgtttaacaaagaattgaatgttgcttttgacattgaaacatccatcgcagggatgaacaagattgtcctgaactcaatctcacccttcttagccttcaagaaatcacaaatataatggttccactcaaaagaacctaagtattgtaactaaaaggtacaaagcaagcacctcattttaaaagtttttgtaagccatgatatcgacaaagtggaaagattttttttataaaatttattgtattcgccatcttcataagtcttgaatatcttaaacgcctgatcgtacttgtctttctcattggatgacattactctttcatatgtacttttctttattgaatagatggtgacttttcatctatatgagatggcgtcggattgaatagatgggacgcttaagttgtatgaagacttgagaagcatgtgtttcaaagagactttgaaatttttatactttactattatcctctaggttccaagcctataaagtaaaatagcaagaagaaaaagattgtcggctacctgaaatattgcagaatacatggccatacgcgccaagtaaactaaaagactttcaactaccaaacatatatggactgcatgaccacatatatgaattatatggtgtcatgtcgtcaacatcataaacatataatctcaggttaactggttgactaactccgccattgaccaataaaatatttaaaactaatttttaatattaaaaatattaattttatttgatattgtataacaaaaaaacacatttaatatccaatataaatatattttgtatatttatttagtgcattaattcttataatagttagttattttttcaatttcaaaactaaattaagagaataaacattttttaagatatgaactattcatgtattaatagttagttttttaagaagttctttgttttatttgctaaatatttttaagcaatagtaacttttttcttatagtatcaattcaaaaattttaactttaaatttgattaaatatttattaaaattttatttttgaatttcaaaatttatggtgcaaaatttagacgaaaaagttatatactcaattatttttcatattactttcttatgtaactcatataatcatgtgttttgggttttgggtttaattgtaatgatttattttctaatgaaaaaaagttcctatacttaattgtttctaataagattgttttggttttaatttaaatttttatatcttaaaaattttaaatcattttttaacattcttagtttagttttgaaattgaaaaagctaactattataagaatcaatgtattgaatatatatgcaatatatatttatagtaggtagattttttttttttttgattatacaaaaccaaataaaactatagtattttttaatattaaaccaattgaccggtgaacctgacttttattacgttcatagccgtcatctttaataggggtgggaattttaaccaaaccgaactgataactcaatgtatttatttaattaattaataatattacatattattaaatatgtaattgcttgcacttttaattttttcatggtttatttgaattattaaacttaaatttacaacttaaacttgttgcttaagcaaacgataatgaacgaaataattttttttggttacattgattagtcttttaaaaccaaattaaaaccaaaccaaaccaaaccaaaccaaaccgaatatagattgacccaaactcaaaccaaaccatactaagagtgcctctaatgtagggttgtaatgcaatttttcagaggttctcttgatattttggatcaaaaataaatcaaaatagaattaaaatgatagaggcgttggagataggcgacacgtatctaaattgtattggttgtgcatggataattttttttgtctcttaaaaggttttgaaaatatatgattattagtgacataatatttagtctgtgatcgactatattgacataaaaacgacataattgtcatccttttcactatgttttgtatttataattattgaatgctttaaatatttggagcagtcacctagcaaagttattgaatgggttcgttcagtggtacataaatgataaaaattctcaaaggagaatcatctttatttgcatcatatcaagaagtaatttgtaaagatgtcgagcgtgcatttggagtattgcaagtttggtttcacattattagaaacctaactcttatttgggataaagaaaaaaataggaaatattatgtgagcatgtatcatgctgcacaatgtaattgttgaagacaaacgagatagatacactctgtttgatgttgagaaattcaagttgaagcaaaccaaacttcaaaagtcgatttatcgtattctacatgtatgcctacaaatctcagagattttatgagcattcaaaatcaagtttgtgattgagagatacatctacaattgaaaggtgatttggtgaaatctatatgaaaagaaatgcataacaatcaacagaataactgatcgtttttgtttttttttgttttacatctattttaaaacatttcaaaataatatatttttaatattttatgctttaataattattaagttttataaaataaaataattttatattaaatttttttcttcagagaactactctaagagatcctaccatttaagtatgaaaaataaaaaacaaaaaaaaaacacaaagctctttggttaatttttctgaaatttaattatagaaaaatggagagaacccttagagaggctctcttctttggaggtgctctaatttcggttgagtttagttaaagttttacaaacccaaataaacagaaccgaaccgaaataaaagaaatgccaacccctattctgtaatgaaattacattctacaatttattgacctctcaactacatttactaatcttatcatttaatgcatgctataaataaatagctttatcttgtggtacgtctttctttttatgcatctccttcaaaggttcattttctttcattctgagtttgttccatcggtacttccttatactttctcgtttcattttcgagatttttttgtttttagtgtccttacaagtaacatcatactttgattactaatagtttcatgattcatcattgttgttcatcatctaatgctctcatttcctcacgcagctccaactttcaaacacaagtgcttttgtcttaagaccttttctcttcgggttcgtgagttaaggtaacaacattactgatgattttggtacaattaataaatttccctaagatttttttaggatattataagcttaatttttaatttgtatagctgatgaacaataaatcacatttattgtagccccatgaagcatgtctcaattgacttttcttgctgcgtttataccattagataatagatagcgataagaaaattaaatggccaagaagcattgaataactaccacgttttaaaatggtatgtacattaggtaggcacgcaaactaatgttactacacaatagtccatttttatttgtttagatatgtaaaaatcgtgtcccaaatttcttctattattttgtcgtatagaagaaagaaacctttcacgggatatgattggttggactttaaaatttttttaaagtcattaaaaaaactataacctcaaaattgaaacaattatgatatagcttttctattttttctcacagcctaaataatatttttttaattattttggctgtaagtacaagttattctaaagcacaagtttatggttctttttttcttttcattttatttttatttttgtaaaaacattactataattttcatatatatatatatatatattaaatttagttttatggatataaatagtagataaatatctactttatgacatatatatatataactcacattgtttttaatatatatatatatatatatatatatattaattaaattgatatttgtgaataatattatataacacataaatacattttacaaataatattttttttgtttaaaaatacatacaaccaaaatcttatttctacaaccaatttctttaagtaataatattatattaataaaatctacaatctaatttctaaatcaataaaacctacagctacaaccatcacacctacaacaaaaaatatacaaaaataaatttacagttacagacgaaccaatcacccacatagcttccatttttaaggtatatagtcgtctagattactatcacaacaatttaaaaaatctagctttttttgtttttgatgtaaagaaatctttattatatattatagactaaaaacgcttttttaacacatgtacgaatccaatttcttatttttggaaactagtgttaactatttatctcttcaaaacagctagaatttttggttttatgttttagtgatgcagaattacaacgcaatgttaggtatatattaattactaaaacaatgtcttgatgcataaaacgttggaaatgttatttttaggcacatataggtttgttaaaattagttagctgttttttgttgtactattaattttttttagtatgtgtaaagctttataattgacctcaattttcatctttctttcaatttgcagggttcttcttcttcttcttcttttttctctaaactggaaaataaagaagaaaagaacatggatttgcattcttgtctaaactcatactttcttttgctcctcctctgtcttcttaatattaccaccattaactcaacgaagccattagaacaagaaacagtgctttttggcggcaactttccggctttttatgttattggagattcattggttgattcaggaaacaataatcatcttacaacgatggtcaaatcgaattttccaccttatggttcggactttgaaggtggcaaagccaccggccgtttcagcaatggcaaaacaattgctgattacattggtaagagcaaaaaaagaatcatgataatgttttaaattactaactcttttataaggatttatgttctatcgtgtgattaactacgtaaaatataatattgtcacatacgaattattagtatatatataatttgtttatatatatatttctgatatagtccatttcttatatttaaattattgaagaagtcttaaacgtgttcctgttatggtcatttgattcagctatctactatggtcttcctttggttcctgcttatttgggattatctcaagaagaaaagaatagtatctcaactggtattaactatgcttctgctggctgtgggattcttcctcagacaggaaggcaaatagtaagttttagtaatattctacaaaaaaatatttgcattattggtttcaaaagaaaaagtagtctaatgggttttatttgtatgaacagggaacatgtctctcgttaagtgtccaagtcgatatgttccaggagaccatcacaaacaatctgaagaagaacttcaagaagtccgagctccgtgaacacttggctgaatcgttgtttatgatcgccattggggttaacgactacacattcttatttaatgaaacaaccgatgcgaatgagtttgcaaacaagcttcttcatgattacttgcttcaaatagaagtaagaggaaactaaaaacatttcatttttttcttggccactactaagacacatttaactaaaaagattttgatttttgttgcagagattgcacaagttaggagcaaggaagttcttcatcaacaacattaaaccattaggatgttacccaaatgttgtagctaagaccgtgccacgtggaagctgcaacgatgctttgaactttgcggtcagcattttcaacactaagcttagaaaaagtctgtctcgtatgacgcaaaaattcatcaaaacgtcctttttatactcggattactacaactacatgttgggactaagaggaccttcaagcaatcaagttggttcgagtctattgaacgtgacaagcccatgttgtcctaacgtttatgatggaggtcaattgacaagttgcaagcctggttcgatcgcgtgtaaggcacccgatactcatattttctttgatccgtttcatccgactcaattggcgaattacatgtatgcgattgcgtgtttccacgagagaagtatttgccatgtgatattggaagattaacttttgtcggcaacaatcttttttgtttgttttaaacaccaatttggttgttgtttgttgctttcaacttttcaatatcatcagaacttttaagattaccactttggcatacttggggattaagcactctattttttttttgtttattgtgttgtattcctttcttttttaaaactaaacaactacaccgaaactcgtcttggtctcgtggatccaagcgcgtcctctcttaaacaacatttgcttggttattgtgttgtatttcagtacttcattatgtccctttcaatcaaaaaagaaattcataattataaattcaaagctaaattaaatggaaataatgataaaaactttaaatggaccaattccaaccttggagtctatcgcctctcggtttcacgtaattaataaacaaaattataatgttgatgattcgtttacatatatatcagattataggtctttaatcgactttaaaataaagataagtgagcttgcaaaagtgaccaaaaaatgacaactaaagatacgtgaaagatttgtctaaacagattattgctctatgatcatgtaaattaccaaaaaaagaaagtaaagaggtgttattcgtttatgattttaaaagagttttagtgatttaaattgtcatgtaaaatctgttgttattcaatcaagattttttaaaagtatgttaaagttttgtgttattcatttaagatttgtaaaaaataatctaaaatcttcataaattttgggttattagatacatactcttataaagtcattaaaagttttgtgttattcaattaaaacaaaagaatctttgattgttaatgattgttaataatttaaattattgtgttattgattcatgacttcttacattttgtttttacaaaataatgtcatggaaagtcatgaaaaatattatcaaaataaagagattgtttgagaaactttacaagattatgaaaaactaatcaacaagattataagaaattctctaacaatcgtttaaaatctttcatttctttactttcaagaatttaattgaagtgatcaaaattccttataaattaagaaccaataagatacgtctggacattagccattactattttgttttaaaattagcctaaaaaggaagttctcaaaaaatattaaaataaaatatggcagctgtcctgaataaacgaagatcgtttccttgaatattgaaaatgtatatgataagtcaatgatcacgacagcgatgatgatcactggctgaggcacgttaaagttagtgggtgtatttgacaccattaaactttgtaaaaacgttttaattacattaaatttttaatatatatgtttaattatgaagctttaacctaatctaatctttagaatccaatttatttgtaagttttttttagtcgtgaatttattaaataaaaaaggtgaacgatctgtgtccgtctagaaagtttcatatagcactataactacacaagattcgaacctctatctcagttttcacaaaatggaagttaaagttcaatttctccctaaatcgaaagttcgaatcatagatctctataaattcgtatttcacggtttatctttggtttactgtatcaaacccaatatcaaaccaaaattaaataaacttaaccgaattaaaatcgatttaagttatcccaacccaaaataaataccaaatgtaattatttaacatcaataataaaatctaaattctaatggatttagaaagttttaaacaattactataaaaaaaaggcaaaaaaaaaaaaatgaatctcctttcgtcttcttctgttcttcctccttcccttttcaaatcccagattttttctggaaaaataaataacaatatacaagttcatggattcgtaaaatcttctccatgtgaattgatgttaatcaaaacccaaatttagaattgatgttaaattcgaattttgcaattttgaatcaaatccaaaatcatttttttctcgaaatgacattaattcacatgagaaacaacttctagatttcgaattgatgttaagatgaaatcaaatttcgcaaatagtctctatctcaattaacatcaatacacatctaccattgaaagctcgagtaattgaatccattagtgccgccggttcaatctccccaacacaccgcaacaaatcccagccattatatgtcaaacaccatcatcacaaaacctttcctccaattacagatcaaatcaaacaagtcttagcaactctacgattttggttttaacttgtgatgttgtcaaaatctgggattatttggaaaaatcgtctggccagtcccttttttacaaagagtaagccaaaaaatccatgtaaaaaacagaaacaatttttgattttttaaattcgaaatatatggatattactagtatatccccatctgaatctattaattaccagaaaacccatggttcgtttccgaaccaaaccacccgaatcacttttactcattatttgaaaatcaaataaaaaaaaccctaatattttcagggatttcccaattcgaatttcattctttttctcattacaaccgtttttgatttttcttcttcttctccttagtaaccgctgaaattaaccgcaacattccatatttctttaaattcaatcgattgttcaccagtatttctgttctatttccgattcgaaatcagtcatgccgcctaagacgcgtggaggaggtcaagggaaaagaaaggagagagaagcgtcggcgccggcaaagacagagaaagttaaggcgccggcggagaaagtgaaggagaaggtgcccgcgaagaaagcgaaggttcaggcgccggcgaagaaagcgaagattcaggcgccgacgaagaaagtgaaggttcaggcgccggcgaagaaagataaatagaaagtgccggctgaggagcagtcgccggcacaaacgactgcgacggcgatgcaaccaatgtggctccaacgacagcggctccaacgacaacggctccaacgacggctccaacgacggagagcccgttgcttgatgattctacattttatgatgctctgaagcatattcctgctgaagaaattcaagaatatgcaaactgatgaggtggaagatgaaaatgaaaaagaagaagcaagtgaagaagaagaatcagggagtagtagccgaaccttgggctccgattccgattcagaggagacggagacaaacaaagaactcgcgtgtgctaatcccgtggaagaggcggagagacaagatgacagcctagccgttatcgaggaggaggacgagaggagcttcgcgagcgacgaggacgtcaatgtggataagtccatggaggatgagggagacgaggacgagagatacgaggacgtgatagtggaaaaacccgtggaggagaggaccatagacgaggacatcgcaaatgtggtaagtattccattcgtaataccgatctaattgggtaataatgcaattgtgaactgtggacagtactagtaacattgggaaatgctatgttgatatttatgtaatataggcggatgtgggtaataccttagagtaatactacaattgtgatttatcgatagttagtactaataactttgagaaatactacatagtaaaataggagtatctgtgtaatactggtaattacggggaatacttctgagaaatacagagtaatactgtggtagtactatttacaattgagtgatatatgaatagtaggatttgtgtaatactggtaatttcggggaatactttttggaaatacagagtaatactgtggcagtactatttacaattgagtgatatatgaatgaatgtttgtttctttcaggatatggaggaagcgatggcaatgcagccacttggtatgtacttcccggcgtcggagtataccaagaagatgaagttagcaacgaggtgttatatctcggaggtgttgaagaccttcgctgacttggaacatcctctaacagatgttgagaagaattattttatggagcatccgagtttcaagcacatctaccacctgccttccggatatacccacaagttaatggagatgtggatgctttttcttcgaatggcatctattgagaagaagaaggaggtttggttcgttgttaatggagttctcatccgctatggtattagggaacatgctttgatctctggtttcaactgcaaggcctatccagctaattatcagagtgctggtaatatgaacttcgccaacaggtacttcaaaaccggggtaattagacgtgaagacgtgaaaaccaagctaatggagatggaaccggctagatcaaaggataggttgcggatggcggtcctctattttctatcaagcatcattgtcgtgcctactaagaccggagaaagggctagtccaattgatgatttctgtgttagggctgggctgcaagtgatcttacgttttgtaagacatttccatgggggagatattcatttgagtacatgttaaaatcgatctcacacacattggatcattttaacggtgtcgtcccgaacactcagtcaccatggcctgttcccggattctgtgtgccgcttgaggtaagtcacatgttttatccttatggaaatggaggaaaaacaagcaacgttcaaagcatttatggatgagatgaaagccaaggtaaatctgggtaataccggatatactgttccttaattggtaatatcgcgttaccaaggtttaactaaattaacaatgcagatgtctcataacccaccagatgatgaggaatcaacaaccaaggacaatgcgactgctcctgttgtgcccaaacgagtgacccgttcaacccgtgcaaagtctagtaacgtgtgaaaactattcgtgtaacttctccggatttgtattttgatttcttgtactttgactttgttttaggatttcgcaagtactcgtaaaactatgtttggattcaattaatgtattaggatgttttatgatattgttaactgaaatacgggaaatacctcgtgctactactactaagatattgaattttactgaaatactggaaatacctcgtactacaacgactaagagatatactggaaatacaaaaggctactacaactaagagatatactggaaatacaacatgctattactattaagagatatactggaaatatcaaactgaacaaccatagtattaccaatcaaagagaagtcttacaatcaaagggaaagtcttacaaagcatacagaaagtcttacaaagcatagggaaagtcttacaagcaaattaacaataagattaaggaacaataggataacacattacttctttggagccataagattacggaataccactttgctcacgttcacaatctctgcacggtgggctttcaatcctttttgcatttcttctatgagatattcatgatttagaactttcttccgattgtaatcaacactctcccttaagctactcacctctacttccatagccttatcccaaagtttacggatgtgcatacaatcagttctatcatccaacaaagtaccaaatatttatcaaatatagatctagatctacaaaaactagaaaaacttgtgcagtattacttgttctaggcagtattaccaaaacgggaaatactctaaaataccaaatatatctagatctagatctacacaaacttgaaaaacttgtgctctacatcaacataccttaaacttctcgcattgatagtatctcttttcatcctttcgagtgtcgacaatgctaccaccacatggacaaaacttaggaatcccttccatcatcgcaaccatttccatttgcgcaatggctctcttcaccactttcatatcatcgtagtaggggtctctctcacacagtctatccatggtagaaatatgaaagaaagatgagagatgtgagagaattcgagtcgaagagagagatgaaagatgtgggagaagagagatgagagatgaaagaaaaagaggaaagaagatgaaagatgaaagaaagttgtaagaagagatcgaaaaagaaagaggaaaaagaaaaaagtgaaatttttggttttggagggaatctcaaaatttgttaggcgccaaaaattttgggggaaaaccaaaaaaaataattccccacgtgtgcgccgttttttggagatttttgacatgtgcgcagcctttttacagcatagtatttcctaaagttttggtagtgccaatttctcaaatagtattactttccatgtttttcatgtttagcagtatttcctatatttacaatttgtttatttagtagtacactggattgaactttataaatatagaggtttaaatattttatgcaattataaattaaatatatgtagcaatatgaatttttcattttaagttggtgataatattaaaattgagcttaaaagtatgagggatatgttgtattgagtctactaaagataagttaaaacgatttaatattaaaatttctaacttaattaagtataaatgattaataatacatttttatctgttaataactcactgtattcattttcattgagttttgatgtaaacaaattcgaactccataacaccaacttagtattaccagtagtactaatatgaccacaaattcgacagaaacagacatgatattcatcatccataatgttaatgaaagcggctaatgcatgaatacaaggatatttttggatatcgaaaatcttgcaactgcaagttttcaaaagcaagctcaccgtataatctactcctttgtcgcatgtgactacatattcacgatcgaatgagtttagctccaccactttcagcttctcggcaaaaaccaacaaatcatgcaaataattctcgaccaaagtcaccatcttattttctaaggatccagacgcggcttccatccgatgttcattaaaccaaacgaagatttttgtgatgatcgcatcaagcattggtattaacgagtatttccttgcgtttttaaacacattgttcaaagattccacacaattgcttgtgtataagttgtatctttctccgggaaaaccacaccttgcccattttttttcacggttgtatcctccaaatacttggtcgccttatgatatctcaacttaaacccgtcatacgctcggttgaagtccgccacgacgtagatccgacttaactcctgaaacttccatgcgagtacgtctcgattggtgtgagtagcatgacttttcacattttaggacaaatgccaaatacaatacccgtgatgagccgcggtatacacgttccgtatggcctttatgaggcttgcatttctgtccgtcatgaaaaccaattctaagtatcgggtacaaccgtttttagcttctcgaaaaaccactcccaactagcatcattctcaccgtcgagtacggcaaacgctatgatgtaatggtgacggttaggatcttgagccgaggcaaacactagcactccgccatatccgttcttcaaatgtgttgcatccacaattaaaactttcctcatcactctaaaaccttcaatgctagctcccaaagctacgaatacgtactgaaatttatcattctcatccaatttcagataagtaactgtaccatcatttaccttcttcaacatgtataaataacaattgatatccttgtagctttcttccgggctaccttttaaatcataaatcgcatgatatttcccccttagcgctgtcgagtatgatactttcacacctaatttcgtctgaactagctccatgataatttttggaaccggagtttccaactgtcccagaaaatgatcatgaaggagagctgcgactaattgtgggttgccttttcttttcctgagcctactactacctttacttagccgagtgcaactatgcatcttattgtaccttctaatcgagaatatatcagtattactgatattggacgctcgtaaacgccaagaacaactctctttggcacactttaggacataacgctccttatccgacttcttaatcacataaacaaaactgttagcaaatgcagctctatccaccacctcgtgcaatgccgccttgtttggaaattcttgacgtaaggtcaacccaattccgtctttccattcttttttaaacatacccggttctacagcaggtggcgactcaacatactgttcccccctatcagaattatccatagactcatcatagcgtgtttcatcttcttgagtcccgtgatcctccactattgcctcaagttgatgttgagttccttgttcctcttctaataagacgatgagtgcaccatcatccactctcatttcatcctcctctgaattcaactccgtatagttcttaccaacagaactgttaccaactctagacaattgctcgggcaattgctccggctcgggcggtttagagatctcctccacaaccaaaacacttctctggttattttttgcggatgttacataaacaaagacatcctcatcatcacaaacgttcatttcttcctctactccgaacaaccgtggattgtacctcatatgcaattttaccttatttgcatttaatccaagcttcgttattatcctatcttctaacattgagagagtaatcttctcccctaatgtcttcatcatcacattatacatgcgaccttggaatttaaaatatatgatcacgttctctttcattgtaacctgccaaaacaatacacatactcagtcaatattactagtattaccgattctagtacattttcagtaatactagtactaattctgaaatattacatgtgtgagtaatactattacatatatgaaataatacgtgtctaagtaatactggtgctattaaaacatactatctatataaattacggtactactatagctagttcgaccagtattattttcgcgacaagaacaaatattcgatttgagttcaatttagtgtgaatcagcatgtgaaatcaattgcttacccattaacagaccaaatgaagcctaaatctatacttaaacttctaatgtaggtgctaaaacacaataacccaaatctaattggattgaatctcaaaatcctcaaaatatgtaattcaaagcttttgaagctctctccatacctggacttagtagattgatgcagcttgcaggaggagaaaaacgacaatgcggctcgccggaggaagaagcccgaagaagaacgagctcgagctttttctttttctttttccgtttttttttttcaaaatgtttagaaatacaggggtaaattcgtcttaacacaattccttaacacaaaggggatatgaagactctaaagtggttttgcagattagttgtcccacaaaagggacacaagagatgatcattcgattataagagggaggaaggaagaagacgaaggagatgtatatttatttttaattcttttcatcgtttttaaataattatttaaattagattatattattaatattaaataataacattgtatttattttgggttgtgataatcaggttttaattcggtttagtctattgggttttggtttgacatgggtttggcacagtaaatcaaagataaaccgtgaaactcaaatttatggggacctaggattcgaactttcgatttagggagaaattggactttaacttccattttgtggagactgagatagaggttcgaattctgtgtagttatggtgttatatgaaactttgtagggagacacaagtcgtttacccaaataaaaacaattaaaaattacacaaaaatattacgaggatacgcatacccgttaatgtcttctaataaaatcagcaaaacaaactctatgttcaatgcaaagcctcctcgcaaattcccgtccccatctcgtagcactcctcccgccgatgcaagtcatggattacccttagaaacactgtccgtattaagtttagtccagcccacataaggtggagaccgtgcaatcaaccttgttacccacgcaggtttgatcacccttcccatcattacgaagctccattatgtggtaacctacatctttaaggatattcatgaaactcttcgattgaggaataacggcattatgacccgtcttcaaagagcagtggttaccgaaactttctctttcattctctccaaccacatccgactatagttccgtagtcacccttctccttgttgatgagcaaattcaagtagctcttctcgtgccagcgagtatctcggccatggaacctcatcaacgtcacttaatctattgactatgactattgtatcgtctaccgctttacccgtggatgatgtgtcgacaaaccgtgttatcacttgtgccaattagcttcttagagttggcttccaagctttcatggatcctttctcgatttcttctagctatccttttgtagcttttgcttgtcccttgttcttatgttgtttctgccttgttcctagccttataacccttgcatttgtggtagttctggttcttcttatattatgatgaatgaaacaagtattttgacccagaaattttctttcataaaccgtttttattaatatgaattatatttggttatcctaaattatttttggttatattaaaattaacgcgacttgattatatatttgtatgttatatttaaatatggttatattaagtatgttaaacatgaaacttgatgagtatatattaatatcacccataaatttgcaatttgtaccccaaggtggtgcatatatcaaatacttttgattatctttaaactgcacaaactttttcgatttccagactaatacaccaattaataggctattatatgcctcaaaccgaccattttcatggtgcctccaacgttcacatttggataaatcggaaagaaatagaaaaccagaccataaattttagtcaaaccaaaaattagaaaattggcaattgataccagacaaaaaaagatatgttacctctgtgtctaacgctatattctctcctttgttatttatctacttggattgtaaatttggctcctagttctatatatgaaggaacatatccaaggtatgtgttatttgttaacttaatcattcactagttgtttcgtatccaaaacaagagttgttgaaatcttcagacacactaactattcggctccgggttctatcaagatccaaagtatgtggtataaactctgtcattccacactaattatttaatgctataaatagctttgatcttctccatatttctttatttaaagatttggcttttttacctttgctttcacttctattcattgtcttcctctgttccattggtaacttccttgttctttcatctaagtgttcttttatcatagttcttttactgacactttatacttatctagtgctctcatttccttacgcagctccaaattcaaacacaagtgattttgtcttagactgtctcatgcgataaggtaacactactatatattttggtgtatttcatagattgccataagattatatattttaggattaaaagcttaacaatatttgatagaagtacgtgggaattagaatttcaatatccttacgtagattcgtttaaagaataactaattctaggcttttgcatggtgtatttttatttttagtgtgtttgactgtttgttattttgtaaatcaattataataaccaactttggattcagtgttggagctagttatcttcgatgcataattttgttttaaactttctcttaaatttttcaaagtttttaattttcttttcaattaccgaagcacaagttgtaaaaaaagtttatatttttttttctgaatataatttaactttatattaaaaaaaaaaatgattataattaacttttcgccatcatgattttttttcgcagggtttatttcttttgaactctttgctcttaaaccggtggaaaaaaaaatataaagaaatgggtttgccttcgtctctagagtcataccttcttttgatcctcctctcttttctcaatgtctccacgatatactcatcgaagccatcaaaagaagaagccgtgctttttggcgggaactttccggctttttatgttattggagattcactggttgatccaggaaacaataaccatcttccgacgatgattagagcgaattatccaccttatggttctgactttgaaggaggcaaagctaccggacgttttagtaatggcaaaacaattgctgattacattggtaagagtaacgttttgtatttctaattgttctttaaggagggacatatggtctaggccgtgtgattttatatccataatttaaaactattgaaagtctaaactattgattagttttaaacgttgtcatgtatgtttttttttatttcagctatttattataagcttcctttggttcctgcttatttgggattatctgatgaccggaaggacactatctcaactggtatgaactatgcttctgctggctgtgggattcgtcgtctcacaggaaagatagcggtaagtttcactagctattctaaaaaatagaaacaaataagaagaagatctttatttgatactttttatgaacagggaaaatgtctatcgttgagcaaacaagtcgatttgttcgaggaaaccattgaaaagcatttgaagacgaatttcaaaacgccatatgagttgagagaacacttggctcactcgttgttcatgaccgtgattggggttaacgactatgcattcttctatactaggttaaccgatgcgaatgatttcgcagacgaacttcttcataagttcttgaaaaaaatagaggtaaaagggtattcacaaattatttacttacgtgtaataatgttaatcaagatacatcctactaaagactttgattttttgttgtagaaattgcataagttaggagcaagaaagttcttcatcaacaacattaaaccattaggttgttacccaaatatagtagctaagacggtaccacgaggaagccgacgaacgtataaaccttgctataagcatttacaacgaaaagcttagaagaagcctgcctgttatgaagaaaaaattaaacaacacttcttttttatactctgattacttcaagttcatgttgggactaagaggaccttcgaccaatcgatatagttcgaatctattgaacacgacaggcccgtgttgtcctttagattatgatggaagtttaacttcaagttgcaagcgcaggtcaaaaacgtgtaaagcaccagattctactcatattttctttgatccgcgtcatccgactcagttggcgaatttcatgtactccattgcgtgtttcgacgagagaactatttgccatgtcgtgtgatttaaatttaacaccaatttagttgttgtttatttctttccgcatgacttcttttgaacacttttctaccaagtcttgccgttttttgaatattgaattcaacgtgattgctttttgaatatcaatgttctataaataggtcactcaagcagtcgaaactcaaaactctatagtgagaaaaaaaaaaaactcggttacgcgaatttaagtggagaggcttatttggctggatcctattcactttcgcatacatttcttaaaaatacaattattatgaaaaaataaagctttaaattatttcttgttttaccaaaaacagttattttacctatttcttgtttttatattactcaaacagtttttttttcttcttcttaatttaagaataataattcgtttcaaaaaagagaagtcatagatcatatcaatgttaaagagagcgctaggcgataagcggcaatgacccaatgcctagcgcctaaaacgcttaatcggggcctaagcgattttaggcggttagtgcgtttataatataaatactataaatatgattttatacataaatattatagaaaatatctataaaaatagtaaatatgttaaatcataaaaacaaattagacaaaatatatattcatttaactatatcaaacattaattatatgaacatttataattatttatataaatataaacttagttaaaaactagaaaaatacactaaacaaggtatagtatatacaattttaagcaggttagacggttgtccaggcgtcgcatgaatgcctagcgcctagtcggggcctaaaggcccgcgtaaacccttttttcaaacactgaatcatatacataacatatatatatattaaagaaagcttcaaaggttcaaaattttggtttacatgtaaaccattaaacaagccgttacaacgtaaacaaaacttcaaaagcatattaattaaacacaccatataacaaacatatttcacttaatattataaggttatatatctatagagatattcatatgtagaagctggcatgcttattattattttatattagttgttcttgggaggatgatgcttagctctccaataatcagcagtgtaagctacaagtccatcttcttcaacacttttgcttgagtttctctctgtctctctatttcctctcttcatcttcgtttcagcttcttctttttcgccacttgccatcatcagttttcgtcctcgtatcatctttttcatcacatcaccatatttaatcgcctgctttaacaattaccaacggttttggcgaataacttgtttgcttatatgaataaaaaacatcacaaaaatttcctttggtaactcgagatatagtaaacatttaagagttcaggaattgaatatacgtgattgataaaatcataagaaaaacatgaaattttgacgtgaaactatttacaattatgttgtttctcaagttaccgattttcaacagagatttgtattatatatatataccttagcagttgaaacgaagtcacggcttgactgttgattcccatcttctaaaaccatagaacaaacaattaggttattatttatctacacttgagtagtgattctagtaagacaataattgtcatgcatgcatgtgtatgtataattatgcatgcaactaaaagtaaaataaaagttagagactatataggctttatgattttgctcttttagatgcaaaagaagatactgtgaggagagagaaacacacaaaccatgaagtgaatagcgaaaggagaaacataaaagaagaatgatcaacacacatagaatctttgacaaagtagtcatgactcttttatattctccttcaaaacttgatatcttcctttatttttctgataatattttcttacaatttaagcaggaggtagaattattaaaagcaagagatgcgtctatatataggagattagtggccatatgttttaagttcgtgtatctataattagtctttgaccatgtgtctctgttaacgtgtaatgtatgaattcttacgatgaaaagttgtacttgtaaatatttacgattcctgccataacgtccatattcaaataactcgaaatatatttatattgtgacatacacatgtatatcttatatctatatgttttttttaataaatctcatcgactgatccggtataaaaacgcattaaagtgtttcagagtaaatttttttccgaaaggtcaccacattgtctatttcgagtttgaaatgttttctgactagtatcaggggtagccagattagatattacctactacaatgtaaactttttggcccaaatccagatttctcacatatatataacttttgtttttaagatgaatttgaacttgagttagtttcttcaaagctttccccaatttttccttaccactagcccacaactgtttcttatatggtatatcgtgtttttattttttcagtttgtactttcgtcaagcctaaagtcgtaaaatataaatgaagttgtgatttgtgaatactttctaacaagtagggaaatgtattaaaagtggaattttaagagatttgtgtagaatctatttatggacctttagcaaaaaacaaccaaacaatgatctgtttatgggttcgaaatggtaatagtagaatgagtatagctcacaacgagaataaacgtagatagtccagtccgaacctaatataaacaaaatttgagtagtgaatatgatgcgaatataactattagattttcactaattttataacctttggaatagtcgaacttttattgattaaacttgtatcagtatacaaagttaaaattatattttttaaagttgtatttctactgctctatacaccatatgtattgttcaaataatttataaggtaataaatgttaagacctaggagatcaaaagactcaaactatgtcaacaacaattcttttcttcccatgattttttaaaaagttatattcaagtattctcgcaaattgataaaacaaagggagactagtctgcatagatgctcgagtttgcacatgtttctctattttgtggaaagtaatttgttaatctcaatgccctaatttctatttatgttttgttaaactactagatatctcataatccttcgtttttcacaaagagtcctcggtactaaaaaaatgaactttatattgtacggacaacatagaagaagaataagctgaaattagttacctttttttctctgacaaaatgaactttataaacaatacataattcatctctcttaaatttccaaaatctaagagatccgttttattctaaactttgatttataatttaagagatttaaagtttgatcaatttttttttgttgcgtctaaaaatctctaaacatcgaaggatggagactgaattgtggtccgttaaaaattggtatttgtaaacaagaaaacaacattacgtaaattgtaattcataaatttgcgtgctttgtgcttgtctacctccacaccggcttacgatgaaccacactctttttaatattcaagacttctatataatcattatatcgtatattcatatatatatatatatatatattatataaataaatattcttttctgttttctgtgttactaacttttattatatagagagagatattcaattatacccaatacaagcctatataattatcaaaattaagtggttttttatttaccaatttgaattctctagatatcttacatacgaggatgtgcttttagtcaaatggacttaaccatttgattccgccttctccaccggaattcgatttcactaagttgcgttatcccgcaatcccgcatagtagggattgagtattgatcgggtcttgtcgatacaaagatgtaaaaaaaaaaattttacatagtcttttttttctgttcttattcttttttttgggggtaaatatctgttattgaacattataattcaaacacttccaaaactttttttaccttgttctgatattgatgcagcgtatcttgaagacaaatgctcctccggtattcatcacgtccgaggagattgtttattgctttacttttgggtttagtttcatatggacttaattaatgtatatttgggctttgaatatttgatattagtttgcttattctttaggctagggtttccattctttttctcttattttaagagatgtaattcattattgtaattagtttttgattattgaataaacgagttttaagagagcttgtctaaagcctagagaggaggactctcaaccctaaaagcttgtgttcaagccctgcaaggaggatttgcaaaacctcatcgatatcgttatcgatctcgaccttatctctattgcttcttcatcaagtttcggcgttctaaacaaaatccgttcgttaatccgagttctcatagagattttgtgttttcgtccgttatttagcttccgctctccatcagatattacttttgttcagtagaccattcataaatacctgccttggatccaaaaataggacaaataaacatcatttgcatcattttattattcttaaaagaaattgcaaatttttgaccaaattgcaaatattttgtttttaggttatacccaatacccacatactgtattatagtcgtaataaaaaaaggaaaagttgcaaaataagtagaggacagtgagaagttggtaactatatatgttttggttaatttagttatgggtatggagtctataacgtatggtttcgatatttccaataattagcaatcgtgtatcttcgttagcatcaacattgttgtattttatttagtgcacaccttctcataatttctaaatcaataaaattttaatatcattttatcttggtatatgtcactatgtatgtggttatttttatgcttccatgtttttattttttttgccatggaaccattagcttaggttgaaaatcatcgattgtaaacctatcatgttttcatttttatgaaatattaggtgatcatccgcgctacaccacggttttttcggatgtttttgtattgtttaatttaaatataatttttatttatcttatcatttactcatgcaataagcaattacatttagtattaaaatatttttttctaaccacattctcaacaatgcatcatacacataatttctaaacaatgtttatcttaaaccaatttaacagagggtagtgttggattctataaacctaagaatttaatgatggagctccttacatattcttcaccctcagttatttattatataaatatcaatttaagagaatataaacatcaatttaagagaatataaacatcaatttaagagaataacttagttaaattattaagtaatatactcatactttgagtttggattaccataaaaatcttcgagtatgagaaaactattaaaatgattttattaaaaaatcatgtgatattaaaataaatttagtaaaagtacaattaaatatgtataataaaataatatgtaaaattaaatataaatatatcattaaactatagatttgaaattgaagagattacattaattatttaataaacacatgtcaaatgctaaagtgatgatgtgtctatcatatgaagagagttggccaactttcatatatataatttacgaaaaaaaaaaaaaaaaacaaatattcaagatctctttcttgatatgggccaatttgatacgaaacattttccagccataacctttcgttttactttatacgggctataggcccattatgggttaacgtgtaggcccaataaggtgttttttcaatttggtttgcatttggtgtgtgtgtgtgtgtcagctacaatttctcaaggagaggcgcgtgtaaatcaaacggataatcctacggttttgatgaaatggcttctcgtagacctcacaatctctaaacatctcttctctttatacgctcttcttctagaaacctctcttacctcactctccttaaacctttaatagggtttttaggttactctttgttcaactactacaaactcttttctctttagagattgagagattgtaaaaaaatctcaaatcttttccttcacaactttcaaatctaatggctcctgctttgagtagaagtctctacacatctcctttgacttcagttccaatcactcctgtctcttctcgtctctctcatctgagaagctcgtttctcccacacggcggcgctttaagaaccggcgtttcgtgtagctggaatctcgaaaagagatgtaaccgattcgccgtgaagtgtgacgccgccgtggcggagaaagagaccactgaagaagggtcaggtgagaagtttgagtaccaagctgaggtgggttctctttcatatctcctaaagtttcaatcttgttttctgggtatctctcaacttgatggggatataaagttttaagatttgattgttgaaatcttatcacaggttagtagattgttggatttgattgttcatagcttatacagtcacaaggaggtgtttctcagggagcttgtaaggtgagtcaattttgatggattgttttggaaatgatttgtgtgtttctgtcaaaatctgattttgaatgtgtctgtgtatgttcagtaatgcaagtgatgctttggataagctgaggttcttgagtgtaacagagccttctttgcttggagatggtggagatcttgagattaggattaagcctgatcctgataacggcaccatcaccataacgtatgagagacttctcattttttgttttacttaagtattgaaaattgaatagaacaggtttacttagagaggtttgatgcgtatatgcagtgatactggtattggaatgacaaaggaagaacttattgattgccttggaactattgctcaaagtggtacttcgaaattcttgaaggctctaaaggttttttttccatctctttgaaaacctgttgctagcaaatctttgatgtcatgttttcggactcattgttttattgctctctttattcaggaaaacaaggaccttggtgctgacaacggtttgatcggacagtttggtgttgggttttactctgctttcttagttgctgagaaggtgaagactttcaacttttgttttttagtgtcttctggttaatgtatttcttacgaggaatggacgtacaattgtctttgctttcaggttgttgtgtccaccaaaagccccaaatctgacaagcaatatgtttgggaatcggttgccgatagtagctcgtatctgatcagagaagaaacagaccctgataacattctacgtcgtggaacacaaatcaccttgtatctgagggtacttttctttattcattcatcctttcatttgatgcgtcagatctcttatagtttgtttgactgcttattcctggctgcaggaggatgataaatacgaatttgcggagtctacaaggatcaagaacctcgtgaagaattactctcagttcgttgggtttcctatctatacatggcaggagaaatcaaggactatagaggtgaggatgaaagttttgtttttgtaatcatattagtgtattcacattgctaatatggtttaaaatttgtaacttgtggtaggtcgaagaggacgaaccagttaaggaaggagaagaggtaaaaaaattatgttgttttaattgtgtgtatcaactatcaaacagtcacaaccaaaagactgttctagaattttgtttactgagttgattttgttacttgtttgtttccagggtgagccaaagaaaaagaagaccactaaaactgagaagtattgggattgggaactagccaacgagaccaaaccgctatgggtaagccttggagctttagcctgcgttttgtacttttctttcaacatgtttactgattattttgtgtctttgaatagatgcgcaattcgaaggaagtggaaaaaggagagtacaatgagttctacaaaaaggctttcaatgagttcttggatccacttgctcacacacacttcacaactgaggtctttatacttatacactatacactatatttatgtcaatttatgaattcttcaattggtgcttactagtctctgtattgtcttgattattaaagggtgaggttgagttcaggagcattttgtacatccctgggatgggtcctcttaacaatgaagatgttacaaacccgaaaacaaagaacattcgtctctacgtgaagcgtgtgtttatctctgacgattttgatggagagcttgtgagtcttttatgggttctttcttatgtagaaatctctttagatttgtggttcaatttttatctgactatgttacctaatctgtttgcagttcccgagatatctgagctttgtgaagggagttgtggactctgatgatcttcctcttaatgtttctcgtgaaattctccaagaaagcagaattgtgagtggtgcaactgttagtgatacaaatgtttatcatatatgaatatcacaaattgtaactgtactatctttcgtgataatgttcaggtaagaatcatgagaaagaggctcattagaaaaacctttgacatgatacaagaaatctctgagagtgaaaacaaagaggtaggtatctcattatcctaattttgttttgagctcatttgaaagccagggatattcatgttgtacaaacaattctaggattacaagaaattctgggagaactttggtagattccttaaattgggttgtattgaagacaccggtaaccacaagcgtatcacaccgctacttagattcttcagttccaagaatgaagaggaattgacaagcttggatgattatatcgagaacatgggagagaaccaaaaggcgatctactacctcgcaactgatagtcttaaaagtgccaagtctgcccctttcttggagaaactaatccaaaaagatatcgaggtatatgcttcaagacttgtttttcaacttcgagtttctgtttagatttgactttctcaccacttgcttttgttaattataggttctatatttggttgaaccaatcgatgaagttgctattcagaatttgcaaacctacaaagaaaagaaattcgttgatatcagtaaagaagatttggaactcggtaagtatggtttagcactgctgactgcccgcacatttctctcaaccatttgtttgtaacaaaacgtgtccattctcgcaggagatgaagatgaagtaaaggacagggaagcgaaacaagagtttaaccttctctgtgactggataaaacagcagctcggtgacaaagttgcaaaagtccaagtctcaaaccgtttgagctcttctccttgtgtgcttgtctctggcaaattcgggtggtcagctaatatggaaaggttagtacttcagcaaaagctttataacctgaaatccacataccataaaacttatgtgcttgttcattgacttatgtgcttattcattgtgaaaggctaatgaaggcacaggctcttggagacacttcaagcctggagttcatgagaggtaggagaatactagagatcaatccagatcatcccatcatcaaagacttgaacgtaagtgtgtggtataatattctctcagaaatctcttgtctcgaaaaagccttattaatttttgtattcttttggtacaggctgcttgtaagaatgcaccagagagcactgaagcaacaagagtggtcgatctcttgtatgacactgctataatatcaagtggattcactgtaagaaatctgaaacctttcttgtttcccagtaaaagtcttggaccattttactcacttatatgtgtttgttgtacagcctgatagcccggccgagctcgggaacaagatatatgagatgatggcaatggcggttggaggaagatggggcagagttgaagaagaagaagaaagctcgactgtgaatgaaggagatgacaaaagcggagaaacagaggtagttgaaccatctgaagtgagggcagagagtgatccttggcaagattgatccttttttaccttcttttgtttgcagtgatttttttttgacagaacgctttatctttccattagcagtatcatgggcctaatgaaagcccataattaaatcacgcgtgaacgagatttatccaatacagtatttgtagtttttttttgataattaaaataattttagagaatttacacaaaaaaagcttttaacaaaaatatttacgaatatttgaaaaatatttgcatttgagttgtattaaatattctgaatttacatcctcttattattaaaaagaaaatacaaattgaaaaatagtctaatctgccatcaattttcaattttggattttgtacattattaatcaaaatcgtctatggtaatttggtcatcactctatattccttaaatacactatatttcaaatttaaataatatttcttaaacacactatattcaatacttatcacctatttattgttttttcaaagatttaaaaaaactaaatataaaaaatcaatctaaaataaaccaaaaatatagttattaattttacatattttttattaaaaatattatgttggcaaacaatattaagagctcgcgaattaattagtggagcggattagaatttacaataattcataattatgcatatggaataaattatatttaaaaatcaatattcgatatatcaaaatatggtacaatcacacattttccggatattatttaaactaataatcttaacggtccattaaaactttccaaatcaaaatgatttccaaatcaatcatttgatggaaaatttcttggtcaaaatttaaatcaaataccgacctgcaataatgggttagaatttgtatttatttgatagagaatgagtaaaatggaattgttaatgaccttggacatatctaaatttataattacaatactaatttggacgtaacacgagttaaactaaattatataattctaatactattttgacaactgtacaaataaaaaaatctcccgcggtaaaccgcaagtttaatcctagtattatttatttggtaatactttagtagagcaattctgatttttacttgtttgatgtatagaaaatgtataaatataagaaaattctggttacataaattttggatttttataatgttggaacaatcgttaaccaaacaattagaaaaaaaactaattaatttccgttgagataattatactttcataaaataaaaaggaaattaagaaaaaaaagaaactttacttttcctaatagtaaaattgtaacactgtaaaaccatcaaaatcctattagaaaaataaattacctaactcgcatcctctataaatacagtagaaactctataaattaataatgttgggaccataaaatttaattaatttatagtgatattaatttatcctataaattaatatttattaatttataggataaaataataaatattaatttatagaaatatttacgtaaaatacaatactaaagtcttttaaaaatgtttattaatttagtttttcttatgttttgttgtttgtatattcaattctgttaaaaaaattatttttctcttgactttttaatttatttttctacaatatattgtgtccgtatatttacgacgttaacgtgaggcttaatccaaattttctttatccaaatcttaccaatgattaaaaaatgttacaaaaccaaatatgacggataaaatgcgcaaagagttacgtgagtacaaaagagatcataccaacggtactctaaagagagttgtaattgtgacttgaataaaagtttcatataaaattagtgttagaatctatgcttagatttatgattattaatttatgatattattgggaccatatttttacatagggatttttaaaaaattatcatcttattatcttatcgattttggttaatttttacacgataaattatccatcagagcaaatggggaaggccaaaaatcacaaacaatccaaaacttaccgcagcactagtactagagcagccacatcaatcatatccctaacagaggtatagattcatgttaaaatgcatgggaaatctcactgatgcgaaagaaacaatctcgacagacatcctccaaacacacgaatcatcacgaggtgaaactatagataaacaagagacctagagtattactacaaacatatataagtagaaacgagaagagtcttgttagttaagagggattcaccttcaggatggtatattggattctggcccgggacaagtcatctctattgtggtaccattttatggagagctgattcgatattaagataaatggaatcaagattggcacttctagttctaaggattggataatcctccaagttcgagaagacaactgtctcatcttcttgacatatcaataaatgctggcgcagtaaagtccacaccagagtccattgtccatataagaatgtcattgaacattctcatagcgggatttttgcctcgggaaggaagtatattcttgccttccacgtcttgttacataaaacttaccccatgtggaaactttcttatcgttaacatgagcccaaattgacatcttaccgctaaagccgatctcaataagagaggattcgattttctgatagatcaaatcaggactgttactatcactctatcagggaatgggttaagtaacccagaggtcccaaaagatgtccatcttagccccttccacgggtgtgataggttctgcataggttagtgcagggccggcccaagtgtttttgttgcttaaagcaaaaatgtgtttggcccattaacaatggggtgttgaaaaaaaaaacaatttttgacaaaagtttgactcgaactagacacatagaaaaagattattagtactgttgaccactataccaccaacaattttaaaatttgatgccccaaattttgttaataaaatctgatgcctaaaggcttagcttcaccatctttagctctgggcgggcatgggttagtgatccattaaccgttaatcattactattgacagatcgatcaacaaacaatttcaggtaagagatggagaaagatcttactggtgaaatctttgatctcagagagatcttcttcgcccatggttcgacgaagagaattagagattcgatttcaatagaatgaggtttgttcaaaccctaatataggggttgattattattcaagaaacatctgatgtcagggttaggccggttaaattttaatttatttggtttgttatgtggttttagacttttagttgggttggattattttctattgatttgggtgtgatttcaatttctattgatttgggtgtgatttcaatgtttgtttaattgtttttctttaactctaatcaactagttatgtcacaattaggcaggaaatgcgagggaattaaccaaaaacaaatatatagaaaaaatacagagatatttttttgaagcatgtccatacattagtttttcttttttcttttgtgagttaaacatatatacattgttttaatggtcattttgtaagaattcttattcattttgaaaagaaataataaatatttaaaagtaatgtatccagtatttaaaatattttattaatatatattggagaaaatctaaatcaattttctcctttttgttaggaaataagttttgtgaaagtctgcaagatacatactgtatatctatttggaggaaacaaattctgaattctttttatatcaaagttttcaccaaaattaaaatctcacactttttaatatttcaacgtggcacttccactgcgtccacatcatcgtgacgtcaccaaaaagtcactttgatctaagcatcgtgttaggaaaagtatgtacggatggagacaatataagacaacatatgttgtccacaaccttaagtttcattttttgtgttacaatctttataaatttgagacgaaattattttctcctatagtcttcatcgcaaaaataaacagttaagaaagctttcttttcactttctccaatggcttattctaaagcatgttataaactcaccaccattacaattcttcttctatccttcacattaccctctcttgccggtaacgctgaaaacgcagatgtaagtgaatgcaaagctgaatctggagatctatcatgtcacaacaacaaagaagcacaaaagcttaaaatcattgcaatcccatctatcttagtggcgagcatgatcggtgtttctttaccgttgttttctcgttccattcctgctttaggacccgatcgagaaatgtctgtgatcgttaagactttagcttcgggtgtaattctggcaaccggttttatgcatgtgttaccggactctttcgatgatctcacatccaaatgtttgcctgaagacccgtggcagaagtttcctttcgccactttcatcacgatgatctcggctttgctcgttttaatgattgaatcgtttgcgatgtgtgcgtatgcgaggagaactagtaagcgtgaaggagaagtcgtaccgttagaaaatggatctaattctgtggatacacaaaacgacatccaaaccctagaaaatggatctagttatgtggagaaacaagaaaaggtcaacgaagataagacaagtgaacttcttaggaataaagtcattgctcaggtgaatttataactgtatatatatatttttaatatcatttcttaattcttgttttgtagttgaagctagagatctatttttaatctagtccaatgaatatttttaaacgatcattttggtgcagatattggaactaggtatcgtagttcactcggttgtgatcggtcttgctatgggggcttctgataacaaatgtaccgtacaatcactcatcgcagcgctttgtttccatcaactctttgaaggaatgggactcggtggttccatcttacaagtaaattcagactatatacgtattaatttgatagttaaattaacaacatgtctataacatataaatatattttttatttattataggcgcaatttaaaagcaaaacaaattggacaatggtgtttttcttttcggtcacaacaccatttgggattgttttagggatggccatacaaaagatatatgatgagacaagtccaactgcgttgatcgttgtgggggtcttgaatgcgtgctctgcaggattgttgatttatatggcccttgttaatctcttggctcatgaattcttcggaccaaagatacaagggaatattaaacttcatgtcctcggttatgttgctaccttcacaggtgccgcaggaatgtctttgatggctaagtgggcatagaactcttgagttagactcatctttacttctgtccttcactttgattttcgatcattggtacaataaaatcttgtactattttgttttgcacaattgcttttatttgtggaatgaagtttgaatttttacatatttattggaacaagaaaaatacaaaataacttttaaaaggaaaactgaatataaaattttccaaaattttacttttctgaagcttaaaagttaaattatcatatttcaaaaggattttaaactgtctttctttaattttgtgcctgtgatgttgttagttcttaccatcaactggtcgaaacaagggtttagttgaagtctcaatcgactaacacaatgcagtcgatattcttaagatacgaaatcgaaatttcgcttgattctaagtttaaccgagaaagagagaaatttgatgattatagagaagaatttcaatgattcgatcaaccattgattacaatcggcatcacagctttgaagtcatggtcacctaaccgaaattgaatctggtagtgatatacatttactactaattatggcataattagatataaatccttttctactaattaatattcaaatcttcaacaatttttaattaatagagtaattttcagtttcaacaaaccatataatgataaaatttcaaaggctctacaagtctcgaggcatggatatcacacgtttataaacaaattaaaatttgaagatatactttcacttaacattggtcaacaatataataaatatgatatgccctcattaccgatatattagctttgaatgataaccatcaaacagaaaaagaagataaacattgtttttctttagttttcaaagaagtacgtagtatatttaatacatatagattccacaaaatttctcgtcattcttttctatatggaggattatacaacaaaagtattgcttaccaatttggtgagaaacaagaaaaccaaatatatcaacaaaaaaataattattaaaaattaaaaatattgtagcaattataaatttacttaaaccagtaaatgaatattatactataaattaatatttttgaaataacttttctaaggtatagaattgcgtttaaaacaaaatttcatcttcagacaaatattgtgatttgattttaaactaaaattgacaagtaattaatttttgaagatatatttattatatatgaagtaaaatttatgaatctcaaatactatccataatatctattactttaaatttaatcttgaatactaataattttaaaattctttttattttctaaagaattacttttatataaataaatctaaaatttcttgtaaaacaaactcaataatcgtcaccatattaaaaaaagctttttaatagtcaacatattcaaattatttcattaaaaagtcagaaaatccattaataaaatatagtctatattttaatgaaaaaataaatatctaccatccaatatatatgtacatctatgtatatctatatgctttagaagttttcaatttatatttaaactgaaaataataagagaaaaaatcttatatcaatggttcagatccgctagagaaattggcggtgccaactttgcatgattatttccatttttctacgaagtatttagaaggtagtgttgaccaaaaaaatctaatattaattggttacctaataagcaatgacaaaacaacgaaaaacttttgaacaaccaaattaaaaatggaaatattgcaaagaccacaataagtatttgaacaatcaaacagctatttaatcactgaaatcatttctcaaacacacaaaatttgagaatacttatttaccttttaatattctaatctatcagtgacgtcaagagcaagatcacttttcattttcttctttctcatttcttgtaagtttttatctttatatctctattatacgcatctaaaacaacactaattctaaaagatgtttaaatgtgatggttaaataaatcatttgtacatcatgtaggtactttcatgttgcttgaaaccgatgcatcaagaaataagcctagtagctatattccgttgtgcggatcagacaattcttgtggtggcttatggtgtcctagaaaaggaggaaagtattcatgtatcagtatgacttgtgacattcaggaagattgtccgaaacttgttcgttgcaaagactctccaggtccttattgtatggaaggattttgcacttgttaaaaaaagtgctttgttttcttataatgcattaattaatgaaatagaatattttattgggtaatccatttcccaagcctttttgttttgtcatcagattttatttagagctcaaaagagccaattctgaggaaaattgtttacataagtgatatgaagcggttcagtacaaattttatgtgccaatttgtccgcatttacatatgcagtttgagaaattaaagataaagaaaatcttgtgaattcttccttatcggtcttgaattcctccaaataaattgaaaacgctggccattcggttggggaagacaccatcttcaccaggtctgaacagtctgtaaaaaatgctacttcttggttgtcggcaccaattatacacttcatcgcccatagtaaagcttcgaattctgtgtggagtggagaaagacttctacaaagattagcagctcccatggttggcgagtctccatttgatgatgtgcaaaaccaccctaatccagaaaacttatcgcttcctttccaagatccgtccacaaaacaacgaaaaccagaatagattatcgtgtgatatattctgaacccaaatttgtttttccgatcccatggaaccgttatcttcggtattgagctctaattgagcttactgccatgattgtgcctcttttctgctaaatataatacgtctaacggatctttatccacattttcaaatattttttcgttccttgctttccatatataccagattatccttggaaatgaagatgaatcaacttttgaaggtattcttgagaagatccaaattcgtaaaaatagaatccgtaggaaaaattcctggaaccgtaggaatctttgagagagcccatatctgtctcgccggatgacattggaaaagggtatggtttattgtctccgtaatagcgccacatctgacacatcctgtatcacaatttatacctcttcttcgtaaattctctgtgacaggtacacaatctgacaatgtttgatccatttcccaagccttatagtcgagatatgaatataatcgcaataataagcactatttggactgaaaccatgttgactgctatgttagcagattttccttaaggtgaaagatatgaatttagaaaagttttataaaggtttagatatgtatgaaaacatttggcttataaaggtaatctatttttgataaccaagtcttatgatatcatgcattcaccttttattaatacggtagtatagtgtgtttgttcatgtgttctaatgcaaggggtaagccaaatatttataaaaacatcaaaatgttaggataaccagttaaaattctgtaatatgtaaaattatattaatattttgagaattc

SEQ ID NO: 163 - DNA, 116149 bp, Arabidopsis thaliana
gaattctttagaaaaagacttcatacagatttgtttttcataacaatgttttttcttaaaaaaccactatgtaacaatgatttttcttaaaataacacgatatatttttttaaatatcatgtcttttagttaaatataacatgtgaaatttaaatgttacatgctattttgtaaaacctcacacaagtgtctcgcctactgttgaacttgcaacaaacgaaggattgttttgtcatttcacctcgtttgataatgtgagttcatgactaatttgcaacaaaaacctttctctctgctattttacgttgtgtttttttggctatttagtaatattatccttcttttatttatgatagaaccctgtaaaatactttgtaaactaaaaacacttattactagctagttgctaattgctatagtgaaaacttataaaaacatttttaaagtaaaacttgtaaaaacgtttttaaagtaaaacttgtactaatttgcatgtagcctaaactctttttttgtttggtttaataatttacagttttacactaacttgttaagctaacacacgtgaatgaaggaaactgataggagcaaggtacttcaacaagggctacgcagccgccgtaggacatctcaactcaagcttcgactctccacgtgatctcgacggccatggctcccacactctctccaccgccgccggagattttgttcctggagtcagcatcttcggccaaggcaacggcacggccaaaggtggctcccctcgcgccagagtggccgcgtacaaagtctgctggccgccagtcaaaggcaacgaatgctacgacgcagacgtcctcgctgctttcgacgctgccatacacgacggagctgacgtcatatccgtctctctaggcggcgagcctacctcgttttttaacgacagtgtcgctattggttcctttcacgccgctaagaagcggatcgtggttgtttgctctgccggaaactctggaccggcagatagtacggtttctaatgtcgcgccatggcagattaccgttggtgctagcaccatgaccgtgagtttgctagcaatcttgttctcggtaatggaaaacattacaaggttagatattaagtccaagaatatggatcatatctctatctcaaatcttgaaaatgaattcttgaaattgagcttgaatctttttcattcgtagggacaaagcttgtcatccacggcattgccacatgctaagttctatccaattatggcatctgtaaatgcaaaagctaagaacgcttcagctttggatgcgtgagtttggctaatctccttacttaattacgccaaatgttttatgttaattgttaattttgaatctctctctttgttgtagacaattatgcaaacttggatcgcttgaccctataaagacaaagggaaagatattagtgtgtctcagagggcagaacgggagggtggaaaagggtcgggccgtggctttagggggtggcatagggatggttcttgagaacacttatgtcaccgggaatgatttactcgctgacccgcatgtccttccagccacacagctcacttctaaggatagttttgctgtgtcaagatatatcagccaaaccaagtaggattcttgattcacactttacctaaacttgtttcaagttctgaaagaaaactttattttttgatgtaggaagccgattgcacacattactccttcaaggacagatttgggactaaaaccagcgcctgtaatggcttcattttcttcaaaaggtccaagcatagtggctcctcagattctgaagcctgacataactgctcctggtgtgagtgtgatcgctgcctacactggagcagtctctccaacaaacgaacagtttgatcctcgacgacttctgttcaatgctatttcaggaacctctatgtcttgtcctcatatctctggcattgcgggtcttctcaaaactcgttatccttcttggagccccgcagctatccgctctgccatcatgactaccggtaagaatgtatttcgattctagagcttacacattgttgacaaaattgaagtttaattctattttaccacttaaaacacattaacatctactggtcctggacttataaccaaatcttgtttcttccatggccatgttctgttttcttagttttaggttggaaatattggaatgagttttcttgaatcttacagttttttcacactttgtgtttccctttcagcaacaataatggatgacattcctggacctatccaaaatgcaaccaacatgaaggcaacacctttcagttttggggcaggacacgtccaaccaaatttagctgtgaatcccggtctcgtatacgatttaggcatcaaggattacctcaacttcttatgctcacttggatacaatgcatcacaaatctctgtattctcgggcaacaactttacttgttcaagccctaaaatcagtcttgttaacctcaactatccttccatcacagttccaaacttaacatcaagcaaagtcaccgtttcaaggactgttaaaaacgttggacgaccttcgatgtataccgtcaaggtgaataacccacagggtgtttatgtcgcggtgaagccaacgagcttgaatttcaccaaagttggagagcaaaagacgtttaaagtgatccttgtgaaaagtaagggaaatgtggctaagggctatgtgtttggagaattggtttggtcagacaagaagcatcgtgtgagaagtcccattgtggtgaagctctaactttgaatttgagtgccaattatgatatttgatctatgaagtttagttgcctatatgtttgaatttaaggcttacaaagaatggtgtaatgttgtgctgatcatataaaataatacctagactagcacccgtgctacaacacaggtttctagttcttattactgatataacgttaccgcttggtataaaggacaatggagacattacagttgtgaaaaagtggtggaaccaactctttaaacctaagttaatggtcttccaacagtagaccatcttgtctaatgcctttgtatttttaatagatttcattctaaaaaagacaaaaaaaaaaagaaaaaaaaagaatggatccaatgttgtagcacctccaacacaagtctagagctgggactgatccaaacatgacttgttccaaacgtcaccatattttgatgtccaacatttaaccagattaaaggcttgcaaatccatgtagtcgccaagataccgacgctgcacaacagattaaaaaaaacatggttcttggatgatagaaaaaataatcaatgatagtaaaaacatggttcttagtagtaaatatacctctttatggtagcaattattctttgtgtgtagtaatattagcttctttaaatcaggtgagttttgtaacactctttctataccagaaataacatacttagagacccttgtgtcaagagtcaaagacttaaccttaaacatcggaaaaggaacaccacgaagctcgtcagtagataacatctaacagaaagatattgaaaaccgtgatcagtaccatgcatatatatatatatatataacatagaagaaaacgttcatatacttaaaaaaacaatcaacggataataaaactaatccatctaccttaagcaaatttaccccaaaagtaagcttctccacgttgtgcaacttttctaacatctttagaaccatgacttgaagagaatcaacctcgattgtttttgaaagtgagccagtgcagatgttcaatctagcttcgactaaagacgagacatcgactaaaatacatggtaaatgagattttctcaatatgagacaatggatatatggtgcaacaatctggagttgctccttagtgtcgcagtttatttctaatgttctcagacgcattgatttgctgagatcaagaatcttgagtgccttgcaggaacacaactttaacttctcaagaatcggactgccagatagaatcttagccatggattcatcagaaagactagaactatccaagtacaacttccgcagagatgtccaagacactgagcctctaggaaccatcatatcacaagggcttaatttaaggttgagttgcttaacagaggaattgatgtagaaaaaatcaggaaacttatactcatcatgattccataaatccagggacagattctccacgttacgggacatgactaactcgatccacctgttgatgtggtggggaatattgttcatcacgctggtatggaggtgaaacgcaaccatcttttgagctgtgtaacgtgttagattttcgttaagagaaggagactccaaattacaattctcaaaagaaagagacggtgtttcgcaccatacatgcctccatcgtttgacaagagggaagttctgatggcgaacttggtcggcataaaggagagtatatcttgtaggatcacatcaggtaaagagcttattaggtctagtgcttctttgcttatccggctgcggctatggttttgacgacggtagctgtgcctgtgagtaggggctcttacagagtcggtgccgctgtcgttggccatcttgaacttgcgtgatttttttcttagggtttattatcaacgaatggtaatgtttttagagaaaacaaaatttcttttttatatcctagtaagtatacaaaaaaaaggaaacatgttataaatagagaaagagatagaggaaatgagtgtgatattccattgagataaagggttctttatataagagtacaaggaaagggtaaaaccctagaaacatttagatgatgggcttagatgatgggccttataatgggcatccatctttattcataacactccccctgatgaccattatagtatcataattcgtaaagtatttgaaatgctgcctcattaaaaaccttaccaggaaaacccaatgggaaaaaccatggttaagggaaaaagagtgcaacatacaattactcccccttatgagtatattcgtcgagatctttgagacggcgtaatccgatacgatagactaacttcttaaaagtagcagtaggtagcgccttggtgaataagtcagacagattatcattcgaacggatctgtagaactcgtacatcgccgctcttttgtagatcgtgtgtgaagaagaattttggtaggatgtgctttgttctatcgcctttgatgtatccgtctttgagttgtgcgatgcatgctgcattgtcttcgtacataattgttggagtcttttttctgcatacataccacagtcttcttgtatatggtgaactatggatcttagccatacacactcgcggctagcttcatgaattggtaaaatctctacatgattaaacagtatttgagaataagtctgccaattcttctcttgaacaaatttctggataaagtacaacgccattcttctgctgctcatgaatcttttagatgattcatcttgaccatcttatttatttctctaaatatcattagtgtataatattcattggatgattgatagaatttcctaatattcatcaagtgtattatttgcgtgttctttaatgtctcgttaaaaaccttgtcatagaaaaatcatgtgggataaaaactatcataaggaaaaagggtacatccacgcatatcattcaatctccccctcggaaacatcttcttcaggagatgattttcaatcaaatacaatatctcgttggaattaataaccataatcttaatgatcaaaattatatggttttcatatagacttataaatatcattatctagtgatattttatcatagattattgtcatcgaattacttatgataactctgtaggagttttaatgattttcaaaacaaatattagtttgatcaatagattttgacaaactcaacataaatatacatttatatgattatatgtcatgttacatattttttttttttttttttttttattcgatcgagtagagttctagagaacataattctcatataattaatccttcagaaattatatctttcaagaatttcatataaatgtcatatccagtgttccgtctcttattgccagactttagatacttaaaaaatattacatccaccacaagagaatatatctcttcataatacatttcttatctttgtgaaaatctcatgaatttcactattctttcacataaagactcatttattttccactggttttacacatcatgtgcatagactactagtccaaatatctctattagaaattataattatatgtccatttcttcttttccattttttggctaatcattactttgtgtacacttttcaatagactttctttcatgatcctcctttttgtctataatatcaactgctcatagcatgcaaatatattacgacgtcgatttgcttttgattccattatattttgacatgacatagctagctagatctcttcattgtcaagtacttgaatgtttcatttgtcatgtttatgtctcttttagagatcattcactctcttcaagagatcatcaaaatatttatttcctcaatttggtcatttttaattttgtgctccttcacttttacgagaatatttatatttggaaccaaggtctattacgcttcatgcgatcttaagactcgatagcagtttgaaattggtccttacaggacactcattatattctggagcattctcaatactttcacatcatcattaaaccaggatgaccaatccggttaagccaaatatactcttgaaacttttaattcttttgaaacttctagttctttcaaaacttctaatttacttttcattgcttatcagttactcccttaatgagatcttataatcaaaattacttccatgtattttaataatcaatcatatgttaataaaacaataacgagataataattaaaattttagattctaatataaacgatattaaatttaatttgactagctatgtaagatcttatattcacttcagaatatgagtattacttatcatcaataactcatatattttttttagcctttgaaaaacactcgatttaagttcataatagttcttaaatttctttcaaatattgtgtctacaggacaacgatacttgcgtaaaagtttaatcttctgttttaccatctgcgcatcagaaatattctcttaacaatgtgagttatattcaaaaagagacttcaagtcttgaagttttagtaataactaattataatttattttatctaataacacattcatataagaattgctttatacaacttttagatctttagtagtcaaagattgaacataatcttctggatatgtcacttattatccattcattacttctccttctcgagatgatgaaacttcaagttcatccatctcgtattaaattccactctagaatcataatgtatttatatctcatcatattaactttgagatttggagaactataccgcatcgatgattttaattttgtattcccatagaaaacaatgtatatgctcttctagagtcttttaataagattttatactacttgatatactagattatttcatcgttagaatttttttttattttttttttatatttattttctcaacttctggtgataatttaagctcttgaaaaaactttgaccatcaaaaatatgatatcttcttaagatacattaaactagtcattcatgaaaatttctataagtgattatacctttaaattaagttatttatcaatcaatttatttcataaaataatcaagtattatatactaatacaattttaatgcaatattgtaaaaccaatcagaataaaactattttgtgcaaaatctggattttacatatatcttgacaaaacttttatttagggtaatatgaattcgtgcaagatttgggtaaaataatttcgtgcaaaattagggcaaaaccatgaacaatttttttttttttttttttttttagataccacaaagatttagagaaaagaatcttataaaaagaaaaattatcttgcaacgtttttagtaaaaataataataacacaatcaaatatatgcaaatcttataaaaagatttagataataataacacaaagatttagatatatggaatcttataaaaagaaaaattatattgcaacgtttttagtaaaaataataataacacaatcaaatatatggaaatcaaatatttaatatggaaaagtcaatatctaaagttgataagatatgtataacgttttaatcaaaggagttaaataagggatatcatatcaatcataaatggattttagacaatataatatttataaaatgatattgaaaatagatgcaactattcaaaactggaatgctaaaacattaatacatgtttgcatcacccaccaccgggctatgaatagttacaaaattagttatataattataaaattggtaatttatatattcaatattgtaatagtaaatcacaaaaattaacaattaacaagcatgattctcttctttaacgattttctttgtagaatcattgaatcatacgatagtaattatagaaacaaatgataagcatgattctcttctttattgaatcattgaaaacatgcttttaccgatctatactataatcatcgatcggctcatattgttttgtttcaataatagaaaataagtactatgaaccatgagtcgataagtaaacatggttcttaaaaaaaaagtaagaatctctatatctaccttttagagcgtgctgataacgtgttataaacagagaaagaggtagaggaaatgagtgtgttattccattgagataaagggttctttatataggagtacaaggaaagggtaaaaccctagaaacatctagatgatgggcttagatgatgggccttataatgggcatccatctttattcataacaaaacattcttttttctttcttggacaaaatttgatattccaactaaaaccaaaatcttatcaaaccaaccacagatcggttatcattctagtggtctttttttgcggtcttagatttattatttattagaaagttatccacgcatcgcgtggattatatattcggttttagttttgaatatataataacatttatattaaattttatctataattgttaatatatcgttcaaaaataatttaaaatattaattttgatgtttacaaattatgatgtgtttaaaaagaccttaattaaaagattttaatgcactattttgtttttgtgaaaacggtatattttactattaaaaaaaaagaaacttaaatgaaataaaattcccaaattttatcttcaattatttagaattttaacttcaaataatgaaaaagtaggtccataatatgtatgttatataaatattataagttgttacatcttgaaaccagagtttattatataagtaattttaagattatttttaaatttgttttatttatttttgtgatatcgatatgtgtcaatcaaatgaactaataataacaaacacaaatgtcattttataaaaattgtatatataaagatcatgagcgtataaattatttatttgtaatgtgatggcaacaattatagctatattttgtgtaacatttagaagaaaaaaaacttaagaatgttcaaaatatattaacccaaatggttcaaaacatatatgtccatttatgtaaaatattacgtgaaataaatgttgccataactgtcaaaatatgaaagtaaaagatgacatgtgtcgccaaaaaatagcaccgtattgtttacagaataattgcgaagaatgtcatttcaacactatcccttatcaattatgcctcgtcctctttgctattttcatttataccttttaatgaccattttatcctatttggaaaatgttataagttaacaaaatgaaatattgatttttcctcttatttaagatgactttcaatagaaaaccctctaatttgactaaacatctcagaatgtctgctaaatatactgaaagatgtcaccctattttcaaatgatcaacaatactttatgtaaatggaagataaattaaaataaataaaatattctctttaagaacttaagagcatgtccattggttagtttctttaaatgaatccttaacattttataatactaacttttgataattttttagtttaggattgttgatgaatccttagagtttttaatgtccaatggtagaatctttaaatgagtttcttaaaaattttaaaaatatttttgatataattataatttgatataactgttatgaatattagatggatgcccattataaggcccatcttctagatccttctagaatagaatattctagaattatcctgtagatgctttgtgaaaccctaaccttatactcctttataaaggacctctcattcattggaataatacacacaaatcttcctcttcttcttcttttctaacacgttatcagcacgagctgcctaagctaatagatactaaaaaaaaatttctgataaaaaaccatatttattatcgactcatgattcataatatcaatctcatatcatttttcgatttaaaaccatgatggcttgaatccgattcatacgttaatcggttgatgatggcttgagtttcttctttattatttctatgccgccgtgtgcttcgtcaataatttaatacacccatacgtttgccgttcaaatcagtttttgataaatcgtatattatttattattattttcatcacgtcctgattttgataaattgtacaccacatgtttaatcgttatatatcatggtcgtcatctcgtttatcttgttgttatgataagtaaatatttttcatttttattaaatatgctatcttaaagaaaagtcaaacatgaatatacggttcatttcatttgccatcacatgtctaatattatatgaaaattaatttaataatctgatcaagttacacgatcgatgatgacttatgctcatttgataaatttattgcttcatatttttttatattattttattgactggtttagttggtacaattgtttgatttggtttgataaattgaaatcacaatctgttatttattgataatataaatatgacatcgttattcatttatttttatatacaattattgtaaaaatatatatatatatatatatatatatatatatattaattgtatcatttatgaaatttaattaaatttcttaatatttcagtgaatcatgtcaaaactcatgagccttgaatttggagctcttgatatcacaggagataactgcttggcatgggcactagatgctgaaattcatctagattcaaaggatctccttgatactattaaagatggtaatcaaactccaagcagagaaaaatcaaaagctatgatttttctgcgacaccatttccatgaggatctcaagaatgagtacctcagtgtgaaagatccacatatcctttggaacgatctaaaggataggtatgatcatcaaaagacagtgatcttacctaaggcccgatatgattggactcatctgagactccaggactataagtctgtaagtgagtacaactcagccttgttcaaaataacatccaaattggagttatgtggagagaaaatcacggatgcatataagttggagaaaacattctctacttttcatgctaataacattgtcctgcaaacacaataccgtgaaaagggattcgtgaagtattcccaacttatttcttgtctccttgtagctgaaaaaaaataatgagttgcttttgaaaaatcatggactacgcccatcaggttctgctccattccctgaagcgaatgtgacatcctatggtcaagaaagtggttacaaccgtggccgtggccgtggttatggtcgtgatcgtggtcgcggtcgtggtcgtgggcgtggatacactggaggacgaggcagtggagttcactttaaaaactcaaactctcacaagaagtgggaaaacaaagatggtaacaaacaagtgaaaacaccatatgcgaatatctgttaccgttgtggagcgaaagatcactggtctcgtacgtgacgtacaccaaagcatcttgttgagctctatcaacaatcagtcaaaggcaaggggaaggatgttgaaacaaatttggtgtatgaagacggagttgatgattttgactttgatgatttcactcacttggacattgacgattttcttcctgaaaaagagacaaagtgatcaaactacaactatttgaagaactatgttttatttctttatttattttttttttgctttcaattatttgatttttatttatttggctttcagttattttattttacgaattattattaaagttgatttattttaattattggattcattatcttatttatgatattaatttattttatttatttgaagaaacaatgaatggtggtgatatttgcttggcagacagtgcaactagtcatactattttaaaaaataagagatatttctcttctttgacaatgaaagaagcaagtgtaactaccgtaacaggtagtgcaaagataattgaaggctctggaagagcaaatatttcaatgcctatgggaacacaattagaaattgtggatgctttatactctcctaaatctcaaaggaacttattaagttttaaagacatccgcagaaatggatatcatattgagactatgagcgaaggtaatatcgaataccttcaaatcacaagtaatatccaaagctctaaaaatattctcgaaaaactacctgctttctccactggtttatattatactacaattaatacaattgaagtaaatgctacagtaaaccagaagtctacagaaaacattaaagtttggcatgaccggttaggccatcctggtacaataatgatgcgaaagataatcactaattcatgtggacattcattaaagaaccagcagattcgtcctaatgatttctcatgtgttgcttgttcacaaggcaagttaattatacggccttcaccaaaaagtgtgatcaaatcacatataccggctgcgaatgctccaataagaataaatatcccagaaggataaaatcaaactgcaaatgagtctaaggcacgtttaaagcgtggtagacctattggttccaaagataaaaatcctcgaaaaagaaaaggggcagaaattggcatagataaaacagaggaaataattacaaatgaagaatctccagaagagaccttagacatgacacagaaagaaattcaggtacctgacaatgaagagatctcaattagttatgtcatgtctggattaaaatggaaccgaaagcaaatcgacgtcgatgatatttttgcatgcaatgtagcagttgatgttatggatgaggatcatgaaccaacatctattgaagagtgtacacaaagaagtgattggccaaaatggaatgaagcaatagatgcagaattaaaatctctggcaaagagagaagtgtttggatcagtagtccgtatacccaaaggtgtaaaaccagtaggacataaatgggtctttgtacgaaagaagaatgcaaatggtgaaattgtgaggcataaagcacgtttagtcgcacaaggattctcacaaagaccaggaattgactatgaagatacatactctcctgtggtggatgcaactacattcagattccttattagtctggcagtaaaagaagggcttgatttacgtttgatggatgtagtaacagcctatttatacggtccactggaaaatgacatttatatgaaagtcccagaaggatttaaaatgcctgaagcagtaaaaacaaattctcgagaacaatactgcataaaattaaatcgatcactttatggattaaaacaatcagggcgtatgtggtataatcgtcttagtgagtacttgataaaagaaggctataaaaatgaccctattagtccatgcatctttataaaaagatttgagaaaggatttgttataatgcagtttatgttgatgatttaaatattatgggaactcctgcagagatttccttcacagtagaatatttaaagaaagaattcgagatgaaagatcttggaaaaacaaaattttgtttgggactacaaatcgaacacctaaagaatggaattctggtgcatcaagagacatatacagaaatgttctcaaaagattctatatggatggagcacaccccttgagtagcccaatggttgtaagatcacttgatgtggataaagatccattccgccctcgggaaagcaatgaagaagttcttagtcctgaagtaccatacttaagtgcaataggagcactgatgtatcttgctagtcatacaagacccgatatatcatttgcggtgaatttattagcaaggtttagctcatgtccaactcgaagacattggaatggaattaaacatatacttcgttacctccaaggtacgaaagacatgggtctgttttttcctaaccaatccaaggaagatttaattggttttgcagatgcaggatacttatctgatccccataatggtagatcgcaaacaggatatgtcttcacatgcgggggtacagctatttcttggcgctctatgaagcaaactattgcagccacatcttccaatcatgcagagattttagcaattcatgaagctagccgcgagtgtgtatggctaagatccgtagttcaccatatacaagaagattgtggtatgtatgcagggaaaaagactccaacaattatgtatgaagacaatgcagcatgcatcgcacaactcaaagacggatacatcaaaggcgatagaacaaagcacatcctaccaaaattcttctacacacacgatctacaaaagagcggcgatgtacgagttctacagatccgttcgaatgataatctggctgacttattcaccaaggcgctacctattgctactttcaagaagttagtctatcgtatcggattacgccgtctcaaagatctcgacgaatatactcataagggcgagtaattgtatgttgcactctttttcccttaaccatggtttttcccattgggttttcctggtaaagtttttaatgaggcaacatttcaaatactttacgagttatgatactataatggtcatcagggggagtgttatgaatattagatggatgcccattataaggcccatcttctagatccttctagaatagaatattctggaattatcctgtagatgctttgtgaaaccctaaccttgtactcctatataaaggacctctcattcattgtaataatacacacaaatcttcctcttcttcttcttttctaacaataacttaataattcttacaaataaaaattatcaaagcttcagtagccaaagcttttttgctcatgaatctttgctaaaacagtttaaaatgctttctcgacattggtggcttcaagagcagatgtttccaagaaagagagactttctgtcttagctagaatctgaccatcttcctcagctactgatctcaagtggtttagatcagctttgttcccagccatcatgatcacaatgttggaatccgcatggtctcttagttcacgtagccaccttaagacattatcaaaagtctgtcttttggtgatgtcatagacaagaagtgcttccaccgttgaagtcgttctttcattaagcttcttccatcttcctcttcatggttgctgctgctgcaactgccttcactactaccacacggctttcttaaacccaaagaagaagatatgatgctgtgtgggtacaacactgtgcttgaaaacatatgtgtactaactttactatttcgtgccaagtcctgcatttgaagtgacactattatcgtcaagcaaaacatcataaaacatcaattcaaagtgtcgtcctcttaggtacacattgaactacaatggttatatttcgccaaaagtaatatggaactcatgcacaagaacaagtgagagcaaaaaaaaatcagagaaagacagtctcgagttctcgattccatcacacattcttataaggaagcttcaaaggaatgtacactacaatggtgagcttaaggcatcatttccacatagaaaatcttaaagcaatgttacattgatcacattatcaaagaactcaaatacagtgagacatcactaaaacttttcattctttcaagaatacattaactaacaagaaaaataaaactaattaagagggtttcagaacactttaacatgtgaccgtctcagaaccaaatcatcatccccacccaaatcattcaaaatctctttatcaacaatctcatcaaactcacctttctccattaccttaggcacgtgatctttaagtgaagacataggagcctcatctggtccattaaacacagaacaaaatttagcttaacgaaatcgaagaaaaagagtagcgagtttgatgataaaatgtaggagaaatatacatgtgattcaacatcgtcatatctttccctcagaccttacatagctctcttccacatcctcatcatcaaaccgtagcaactaaaacgaaattgtatacttaagattcattccggaacaaaatttcagagtcaaacttgaacacatagtagaacaagtcttagatcaaaacagacttgtaatcgagtgaaatttcaagcatataaccacatctattaaccataaattgctgattagatgactcgaaaccgtaatgcgatcacatcaaataatcctcacatgaatacagagagatacttaccatgagaaagagattggagcaaagagactgtctcccaattttatgaccgatacaccatagtttcttatcaaatcgattcaaatcgcctgatttcgtcgtcagagtaaccaaagaaaagagataggagaaatggaaagagaaacacgcggagcatgatttttttttgttttgcctaaattttcaccctcagaagcggccacgtctgagtttctaaacacttctaaaaaacctaaaattaggatcgatcctaataattttgttgagtttttctttaattttgggcttttattccttaagatttcagataagaaacccattagaaacactgatggacatggtctaagacaacaaaaagaaattgatagtatatatctatataatgcatgataaaatgaagagtttagagttaatatattatattattgagttgtttatttaaatttgatttgtatataatgtaaagaatttaagagcaaataaaatttttgtcaccgttaagtttttttacaggattttcctttaaaaggtatgttaaaataattaatacctagaatgtataataatatattttatacatgattttgaattatacaaattagatttgttttcattatggttatttgctttcaatagtttaagattattgttagaatttcttaatttttattaaatatttctatgaatccattgcacatgagtttcaatataggtgaactaggaacatatattcttatttttaattataataaatgaactgccaacaatttgttattattaaaactccaaacagatgagccattgaaataaaattccatatgtttttgtttaattatttagcataaatatagtttgatttatttctaacttcaaattatagaaaaagtaggaaaattatgtctctaagttacctataataagcttttaccttaagtttttttatataagtaatttaagaatatgtaacaagtgttattattaaaactccaaacaaataagccaatgaaataaagttcccaaattttttgtttaattatttagcatttttaacttcaaataatgaaaagtagggtccaaaatacagcttctctgtttatatatacaaatttatacatttttattcttacaacttatttagtgtacatttccatatgaatatatgaataaaaatatgtatatttctgtatatatgtacattaaatatgttgtacgaattttaatgtgcgaagcaaatagtgaaaaattacttatttttcaaattgtaaatagtaaagtgattacttttcaaattatgtttggaaaagtgactactttgcaaaactcactcataaagatatggtattattatttaaaattttgaaacaacatacaaagatatcaaatgaactcatgtcttctttcaacattttgctgtatattctaacagcaaattattaactcataggtttagtatataaaaatcgaaacaaataaaaaacattagttatgcttatctcatccagttacgtacatgtcccgacggtttattacgatctcttctaaaccaaattccatcaggcttagcagtccatgagcgatactgattacatcgttcagttgcagctgctctgtatacttgaagattaaaatgaaactccattttatccccatggttcaacatacatgtccacactgtcctttctcttctgttggaaacatccgaaaacacaatggtaaaattttgattgacttttaaatattggacacctttatcttgctcgttaatactaccacgacaatgatgcttgagaagtttaccgggagcgagttggttatgaatttctacaacatttggtgtgttgcaagcttcattgaacgaaaaatgaatggcaataactaacgtaaaaattatgaggtgattcatttttcttagatctaagataactgttttgagtaatgaggccatgagtttgagatatttataattattttgtgtagaaaatattataataattatcaaataatctatttgtggccttagctaaatttaaacacaaacgtgaagcaattaaacttttgaccaaaagagagtttcttgtcgaaaagtatggttgaccaataacattgaaccaaagaaattaagttttctaaattatagctcggccctgaaattaacaaaaatctaaggttatagatgaaatttacttgcctattcatttactacaaatttaataattaatttcaaattttacctatttattttttggtttattggaaaataatttttattcgaacaattatagtgtttcgatcaataaatttcttttcaagtagctcaaatattctcatttttatttgagtaatatttccaaaaatttggtataccacttggtttaattggttcacgtttgtgttcaaatatagtgaaggttctaaggccataattaaataaatacttcaatagacatacacaaaaaaaagtaaaaccacaaaaaagagacatataaaatcaatatcataatgcaaaatatcaacatgttttatttatttatcaacacatcaagagggtttatagtccatagatcaactgtaatatatagaaaatgaatggttacttagatcaatcagcccattaacatataaaaagtttgattacctagatcagtcacacagagtttatagatatgggattattaacaatattctttgtcttaattatttttaatgcatgatatatgattgatcacatagtctttgatcttaagttaaagtgttaaattatactcatcaaaattgttgctaggacatagataagcaagtgtctttatcacaataatagttggtgataaatcactctctgaaatctgaatatatcaaacttgatttttaatgtgtgtttaatctcctgatttaaaacgaaagcatagaatattaggtgattgtttatatctcatccacagtgaactatccttagatgaaaatttgttgaaaagtttgactatctacatatacattttttcagccattttaacaaataaatcttagagttggacttatttacaacccactgccattagcattaaatcttttttccaaaataattaattttactttaaattcttaatttaaattgttaattgcattatcaatcaaatttaatccaaacaaacttcacatcatcccttaaaattagcataaacgtatttgttaacaatattttaaaacaaagttttttgtttaaataaatattattcttactaaacattttttgtttaaataaataaatcttgtatttaaacttatttacaatgtcatgctaccgtattaattatttaggaatgaaaatatttaattaacgatttaaatcttctaaatcctcgcttttagagttattatgtcattacctaaaaggcaaaaaatattattatttttaaatattattatttatacatttaaacttataaaaagtttaatatatcaaataatttaacatcattatacaatatatagagtttaaaaaaatctcaaaaaaatttccgtcatattttgtgattcgaaattttaaaaatgaacatatattaaccaattggcgaaaaatgtgtgggttcaccatcctgcatcgattaaatatttagacaatgattcataaacatatcataaataagatccacattaataaaataaattttttttttttgcaggacgagttttgctggacgggtttggcaggacgttacttaataacagttgtaaactataaaataaaatattttttataaatagataaaatttgcaaatttttatatatactaactttaaaaaataaattatctccgcggtgtaccgcgggttaaaatctagtttatgtatacaaatagagactaataaaataaattatttactcacaaattagatgtcgatcatattatttcttaaaatgtcaggagctctctttcttctctcttacatatctttcagagagacaacttcttatctttaatcgctgtccgaattatattgtcggtttttgtgcccagacgagatctgattttgctatcaacacggcttttccgttgccgtgttcttgccgttaacacgaagtagttgttggattttccatagagaggtggaggacgtcaaacaagagacctacagatcttcaaaggagaagagaaaccaccagatctgcaaacaacaagacacatcggaaggaaacgaagaggacaaacgaaagactttatacgtgaggcgaaaccagtttggattctgcgggagaggagcggagcaacaaagagaagacaaaattcgacgccggggagacatagctacaccggcgccagaagacggtgaatcttttggagtctcgtgtatgtcgcatggcagagtttttactctttttttagtactagaataaacatttaacgttaatcattacatctaagttcataagctactattaaaagtgacaagccgtgcattggattttattctcttattgagtctaattatttttgtgtatcttcatggtgttgttttgctattactggtgaaaaacagatgatctaccaacgatttcgttacgacgtggtttctcactgaaaaaccgtatctccgatggcgaaagatgacgatgggaatctttcttttgctcaccttacacgtgtcttttggtgatctttcttgatccaatcttcttctataaacgatgcattattgggctcttcttgggcatgcgtttgttcgtagtttatttatccgtgttcggctgtacttggccttgtaacaaatggtttattgaacaaagtccaccattgagaaaaaaaaaatcatattatttctttaagcttagtggattggtatggagaacaaatatatacaatatcacaagtgatactccaaaatctcctaaattttaaagcaaatcatcaatggtagcaaattatttctttctataacgttgacatttttcaacaaaatactcctccaataaaagttttttttatttgtaaaagtctttctctgatttgctttctgattctttcttgctctttttctaatgtatatatttattttatataaactctttttttacgacatgatttttttttattcttttacatttaaaaactaatattccttctgtttcataatataagttgttttcaaatttctattcaaattatataatacatttttttttaccttttagttattttcttttttttaatacattaggagttagtccgcgcggcttatttctatatacatgtgtccattattttgatttgaaaatgtatattacatattaaaaattgtatgaaccctttttaaataagaattgggttattatcttgcgataccattataccatcgatgtctattgtcttgttgtcgatatgtcacatcaaaagtatagtgtatttcttcacacaagcaatgtatatatgttcaaatgtgtctgcttttacataaacaaatctaaatcaattacatattcatgcacaaaataatttattttatgtttagtggtggatcacacccatcataactaagactgatggggaactaaacagaaggtaaaattcgttgttcttgttttgctattgtgttgaagttgacttaagcatctcaatgtatggttgttttaagtcttcctcaatcaccggttctatgactacaattctatgactatacatatatctttgcttgcatacgtcaactttactaaaattaaaatgaaaaatgaaaaatataagaaggttctatagatatcaacgtgtttgattcaataaagagaatggtaaacaattttagatatattcacaaagtcagaagttttagccacaatctggaaactgaagcaccaatgaagataaggcaatcaattatttgaatcatagtcattctggattttatagaggaaatgatgagacgtttcaacttacaatttaagtggagaaagaaaacatttatggaggagaaataacgcaaatgcgtgaaaaactaatgcatcaaaaattttggatgactgatgtggcaagatttaagagaaactcttatttgctgaagtggatactttgacaggtctcaaagagttatttttattagtagtagattatagagtaatattagtagataaccaaataaaacatacaaattaagaaactagcagagagaaagttttttgttacaaaataaccatggatccacattgtctgaagaaaggaaataacaaagctacccttcatttgttgtaagatgaacagtaaacgaaacacatccgtgtaatttttcaaaatagtatgtaacattaaaatttcacatgttatatttagtttaaaaacatgctatttcaaaaaacgttatgaatttttaagaaaaaacattattatgaaattcttttacatgaacagaatctttaaaaaaaaaattatatgtgattttaataaaaaccatgtattactaaaaaataagaatatatttttaaagaaatcacgtgtgatcttaataaaaaatgtgtattactacaaaatatcatgataaaaagagatattaaactgaatagaatgttttttccaaaaaataccatgtgctttttataaatattatgtaataagagaaaataacaaaataaaaagaggatattatgttatcgtatgtatttcggaaaaataacatgttacaaaggacatttacgtaattacacgtgttctccaacatgttttcgacaagatactgtgactcaaggttagtttgtacattcttttcaaatctatagtcatttattataaatactctagattatttctgtttaataaaataaattagtgatagaggatatatgttatatacgttttataaactattcagcttttttttttgcgtcaacaagtatattagattgactcaagcaaatcaatgttgagtaagattgtttacataagtgataatatgtggttcggtacgaactttcgtgctatgtaatctatcttgacattctgtttcaaaaaatcaaagaaaaaaaatcaaactattctttgtcactaaatcgcccccaaatatgtaaaacaaatttcccattcttgtcagaaagatatcatctacactgtaaagaaagtttttctcgtttgtcttggttgataatacatttcatcgtccaaacacttttatctctgcatgtagtgtggttaactttttttgaaggtttacaactccaatatcatgtgttccattattcagataagtacaaaaccatcctagcctttaataatatgtttaatggaagattcaatgttatttttgtttgaattttagtctttttagagagccgtggaaaaatccaatattgaatttatggtccattaaattaaattatttatacatgatttttagtgaatttatctatattaaagcatttaaatatatgagtggtgggtatttcaaattatcaattatggttgaaacattgaaatgatatttattgtgtaggtcagtaagatattttaatataactattattatggtggagaacatcacaatacaagttctatttggaaattaaatttgagtgcttagattatttttttcagtttacaataacatttttttttttttttcagaaatagtgtcaagtatgtttagattattatatgatagcctaaatattggaaacttttgaaaaatgtctaaatttttaatattgaaaattcaaatttgcagtgtcatataataattttttcttctttcacatgtagttaagaatattattaaaattttcaattgatgcttcctttttaatttgttttaccataatccatatagttgtgtttgttgatgcaatatatgtataatttttcgttttttcgatgttagattaagggtttgaaaatactgatacaactatataataaaagtattattagtataataattataatattattaaataattttaggattaaaatttatttattaaaataaataaccttaatatatcttaacatttatttttaagctattaacattataaaatagtaattatgttgtaaatactctctattaataaagcaaatataaatcttacaaataattaaattacaaattttagaagattttaaaaaatattaactatgaaaagaatatatatatatatataaaactaaaataacgaatataaccatgcaaaattgattgtatatatacaattatgtatgaatataattcacgcaacacgtgtcagattttttctagtatattataatgatgtctctgttttctgttctttgaagtcgtgcattctcatctcacacgttccaaggtcaagaaaggatcgttgacaagaactaaagatctccaagaagataatggaagatccacttttattgggagacaatcagataatcaccggaagtcttaagccgacgccgacatggaggatgaatttcacggcggagctcaagaacctcagccgcatggcgctgcctatggccaccgtgactgttgctcaatatctattacccgttatctcagtcatggtcgccggccaccgcagcgaactccagctctcaggcgttgctcttgccacttcttttacaaacgtatccggcttcagtgtcatggtaactactaactagttgttattaatcctcagtttcaagatccattcgaatctcaaagtcttgaatgtttttttgcagtttggtttagcgggtgcacttgaaactctatgtggccaagcttatggagcaaaacaatacgcgaaaatcggaacttacactttctctgcaatagtctcaaacgtacctatagttgttctcatatcgattctctggttttacatggacaaactctttgtttcacttggacaagatcctgacatctccaaggtagctggttcttacgcggtttgtcttataccggcattgttagctcaagcggtgcaacaacctttgactcggtttctccagactcagggtttggttcttcctcttctctactgtgccataaccacccttttgttccatataccagtttgtttgattctggtttacgcgtttggtcttggaagcaatggagccgccttggctattggtttgtcttactggtttaacgtcttgattcttgctttatatgtgagattttcaagttcttgcgagaagactcgcggctttgtgtctgatgatttcgtgttgagtgtcaagcagttttttcagtatggaataccttcggcagcaatgacaacgtaaaaacattcatcttcttcatcgttggtgcattcttttctttcttggcttgatttgtttttggtttctatatgcagcatagagtggtcattgtttgagttccttatattatcttcaggactcctcccaaacccgaaactcgagacctctgttctttccatttggtaatctatgtttctctctggatctctattttcctttaaacatatctagtatcatgaggacttgtcatatatatattggtctaatgagtaaatgtcacataaaccaatttttactcttccctttattatctaatttagtgatgtaatcctgtgttggttgttgttgttgtgttcatgtagtcttacaacctcatctctccactatgtcattccaatgggtattggggcggctggaaggtatatgtgattcagttaaaacttattcaatttttgtttggaaatggtcagattagtcatactatttacccttggcagtatacgggtttcaaacgaattgggagcgggtaatcccgaggttgcgaggctggcagtgtttgccggtatattcctttggttcctagaggctaccatttgtagcacacttctcttcatttgtagagatatcttcggctacgcctttagcaatagcaaagaagttgtggactatgtcacagagctatctcctttgctttgtatctcatttttggttgatggattttctgcagtgcttggtggtaataaaatcaaacccattaactagcaaatcaaataaaagaatcgatctacgcgactcaaaatgtgttttgtttgttatgactttttgaaaaggggttgctaggggaagtggatggcaacatattggagcttgggcaaatgtggtggcttactatctcctaggagctccggttggacttttcttaggattttggtgtcacatgaatggtaaagggctatggatcggtgtggtggttgggtctacggcgcaaggaatcatactagctatagtcactgcttgcatgagttggaacgagcaggttaatatcaatctgaaatatttatgactctttgttttccgtactgaggttgcttacatcttgaatttgcaggctgccaaggcaagacagagaatagttgtaagaacttcttcatttggcaatggacttgcttgaagggttctttattcccatttttgagacattataatctaagtcacattataatcttttttcttcaattttggcattgatacaatagagttgtttataaaaaaatatgataaaattttaaacttaactagtatcgtgtatctgttttacctttctgttattaagagtctgatttgaaactcatgttagagtagatttaaaagagagaaaagtggttcttgtcatttactctatttttcctttagtcaagggaagtaaaaaaagaaacaaatttttttttctttccctttcatgtagataaacaaatataattaatagaattatttaaaattatttagtttattctcatttactttagttttttttgcccttccttctaattactaatatacatttactctaattcttttattctcaaaatttaccaatacaaccaaataaggttaatattatttaaaaaattcagtgtctatttaatgtttgatttgatttgtcgaccacgagttccacggtttatttttaaaattaatatatcatattttgaaaaaggtatctagaagaagtacccatagaagactctgaaattaaccacacaaatcgatattgttgagtgttgattaacaaatactggacccccaattttgacacttttactcctacttcttttgcatgcgtggatatgaaatattgattacatatattggtttgtctgaaaaatatagtaaaatcgttattaaaactaagaaaagtttttgaaatattttatttaaccgctatattatgtagataacaatgatatcatatcaattttgtggaggtaacatttgttttgcctatgtaaataattttgataccctggtagcctaaattgtcagaacctaatagcatgattgtcaatgttgttattatgatgctcatcatgttagcaatgatcacaatgctatctctcataaaaataaagttataaactacattctattatataaagatgaggtttcctaatctaaaataatttgaaatgtaaataatataatttagacataatgttaaacttcttaaacttcaatattaacactatccttctgtcatatcttagccttatcatatccaccagcgatctccagttctccatatcccaatattaacaaactaaatttagttgtggcaatgatcccttctcaaatcctacattcactggtctatggttaagcttttgtgtcgtaatcattaagattttctgctttgacaagtttagcttagatcttggtcccttgactgtatttaatttgccatatggtattccttcttaggatctttgatagaattgattgatctaagttaaccttcaattgaaaaatttatgagttttacatgaaattagaaaagcaaataataatccaacagttaaaacaaaatccaactaagagcgggaaaactcttttctccgaaaagactcgtgtcatttttttcctccaacgagccaggctgttgcacttatatttgagtcacaatgaactatgaactatccttatatgaaaatttgttgaaaagtttgactatatatgtatacaaatagagactaattaaataaattatttactcagaaattggatgttgatcatattatttcttatcatgtcaagagctctttttcttctctctaacatatctttcagagagataacttcttatctttgatcgctgtccgacttatattttcggcttttgtgcttgaatgaggtccggttttgctgtcaacacaacttttccgttgtcgtgttcttgtcgttaatacggcttttccgttgtcatgtgcttgccgttaacatggctttcttttgccgtgttcttttgttgtttcaaagaccacggcttttccgttgtcatgtgcttgccgttaacatggctctctattgccgtgttcttttgttgtttcaaagactcgatgttgaaaattttcggggttgtgtgattgatagatcaagatagttttctcttcaacagacctaaccttggtgttgtttgatattgtttgttttctgtttttctcttcggatcttttatggtggtagcagatttctctcaacagtgtttcttttctagctcatccttttagcttgtgcgtacaaaaattctatgcactttgtgatttcagttgaagatatgaagcaatttcgtgaacatatttcaattgcatttagctgtcaattattttagaaattcgattggttttaatccacaatttttagaataattagattttattttattattgagtttaattattatgatgtatctccatggtgcgattttgttattgctgataaaaaacagatgctctaccgatgatttagttacaacggtggtttcttcaccgaaaaaccgtatctctaaatttgtctttgggaatttttcttttgctcatcttacacatgtcttttggtgatctatcttgatccaatcttcttctgtaaacggtgcattattgggctcttcttaggcatgcttttttcgaaatttgtttatgcgtgttggggctgtacttggccttgtaacaaatggtttatggaagaaagtctaccattgaagggaaaaaagtcatattatttctttaatcttactggattggcatggctttaaaaaaatggagaacaaatatatacaatatcacaactgatattccaaaatcttctaaattttaaaccaaatattcaatggttgacaattattctttctatgattttgactttttcaacaaaatatttttccaacaaaagtttttttgttggtaaaagtccactaaacgttttgatgtctctgattcgttctcgctctttttctaatatatatatcttatataaaatcattattatttttgcaacatgaattatttctattttcttacattttaaaaatactccttccgtttcataatagaaattgtttttaagtttctattcaaattatatattaaaattttcttacattttagttatcttctttttctaatacattacttttgtttggtaaatatattttattaaatgggagataacatcccaatacaaagttcttccaaatttttctttgaatttgtatattaatttttattataaaataacataattaaatatattttttgtatatagtatcacattaagttttacattctcatatcagacattaatttagaattaactataataatggatttcaatttaatatatatcaataaaactatatacaatttgggtgatagaagatatatgttaagttgttaacatatccaacactaaattataatttatttatatattttagaccatttatttaatataaaatatttgttaaaataattatataaattgaatgatcaatggagataagcaaaatgttgaaatttaaaaaacaaattgtattctacggtttcagtataatgtttttaaattatttagcaattttattttgggtcaacaagtatattagattgactcaagtaaatcaatgttgagtaagattgtttacataagtgataatatatgttttggtacaaacttttcgtgctaggtaatctgtcttgacattcgcatctcaagagaccaaagaaaaaaaaaatcaaaatattccttgtcactctgaatcgccccaaaatatgtaaaacaaaattgccactcttgtcggaaagacactatattcaccaaatctgatctgagtaatctgtaaagaaatctacttctcgcttctcgtggttgatcatatatttcatcgctgaaactaatgcttctatctctgcatgtagtgaggttaagtttttttgaaggtttatgatataaccctgtttttactgattttatctatgttttagatttaagattttgtgtctttttgttatttctcgagtctttttaaagtcttttcaggtattctatacggtggaacaataatggagatgatgagacattttggagcaaaaactaaggaaaaggaagctaaggacgatttcagttccagattcagtgagagtgtcgatcgacacactctttttgtcgaccgacaccagtttcggcccagaagagtccatgatgctttcaagtttacagaagtggaaattaaatttgccccaaaagacttctctatttgcattattagtctctaaacaatttatagggcatagatatagttttagaggtcattgtttagccctaagttcttttctaccaagttttgagagagacataagctattcatcttctgttttcagagattcattcagttttcaatacagtgaagcgatcctttcatactctaatcttatttgctgtgtttatgctttcttacttaattatgttgcttgtttcaatcaatatgtatgagtagtttgcttgttaagaatagagtttctcattagagattcatatggtttaatagaaccccctttgctaggttatcttagaattcttcatttttaattgatgcttttattttttaatttgttttaccataatctatatagttgtgtttgttgatgcaatatatgtatgattgtttttgtttttttaaatgtcagattaaacgtttaaaaatactgatacaactatataataaaagtattattattataataattaaaatactataataattataatattgttaaattatttcggattcaaatttatttattaaaataaataaccttaatatatcttaccacttattttcaagctatcaacatttatgtttataactactctctattaataaagcaaatcaaaatcttacagataaaaataaaattcccacaagttttatttaaattttaataaacaaattctcttttaatatggtacataccactttcgtataaaagatattttagaaactcataaaggtcaatttacaggccagaatactttatgcttaattatttatttttggaagattttaaatatattaactagggaaagtacacaatttatacttggaagagttgttatttaagtgtacaaaaaagccactattgctggtactgtgtatgtagaaattggcatgaccccctaggaagatctttttatactatatgaatatattgtatcagatcataattgttcttcgcatgtggttcttttttgttatttatttattgatttttgggaaaccaatcgtcatcatcatttctgttcctatatagaaagttaggggtttcaaaatgggtcaaaattcataggtcaactcaactcaactcaacccatgaactctaatgagttgaaaatttcgactcaaatgagttgacgggtcaaatgagttattctgtcaattggtttgatgagtaaaatgagttggattgtaatggctaatggtttaaatgatttacccaattaacccatcaagtattataaaattgaattaaaccaactaaaatctctaaagaaatgtcaatttaagtttaaccaacacatctaaaccaatttaataaaatcaatattttccaaatttcttaaatatacaagcgatgaaattgaaaaaaggtaaactcgtaatttttccacctaaaaacataaaaccgtgattttcccgccaaaaacataaacccatgattttcccgccaaaaacgtaaacccgtgatttttccgtcaaaaacgtaaacccgtgattttcccgccaaaaacgtaaacccgtaatttttccgccaaaaacaaaaacccgtgattttcccgccaaaaacgaaaacccgtgattttccgccaaaaacgtaaacgcgtgattttcccgccaaaaacgtaaacccgtaattttctagccaaaaaagtaaacccgtaatttttctgccaaaaaacgtaaacccatgattttcccgccaaaaacgtaaacccatgtttttcccgcaaaaaacgtaaacctgttattttcccgccaaaaacgtaaacctgtcattttttccgccaaaaacgtaaacccgtaaaaagtggaatctgtaaatatcttaagtttgatgataatgaattaataattattaataataataattatttattattgttttataataataattaattaaattattacttaaatgggttaacccatttaacaactcaacccatcaaattaaatgagttatgagttgacccaacccatttaacaaaatgagttgggtcaaccaataactcatttaatcctaaactcatttgattgtgagttgagttgagttgggttacccattttgacacccctatgatattagctggtaacccaagtattaacataccaatttgtattaggtggtaactttgatgcaaaacttatgaattcaaattttaatacctctaagggtattttcactatatataaacatatattagccgttaacaaaacgttaacgtaacatttgtattaggtgctaactctaattcataacaaaagtgaaactatctgaaatcacgaggaacttatgatattagccggcaacacaagtattaacataccagtttgtataaagtggtaactctgatgcaaaacttatgagggtattatcactatatgtaggggtcgattggtaacggcggttaatttaaaccgtaaagacttcggctgttacgacattaactgtaaaaactttggctacagagactttgactctagagacttgcactgttaaaattgattggtacaaaagaaactttagaaactgtcacaattatttttattattattaaatattttttataaatattatttatgctaaaaatcaatttatttggtaatatagtgactaaaataaatttatttaagaaaaatacaaaaaattcatagataaattcataaatataaaatttcattttacaaattcactattttaaatattcaaattggatctcaaaaaactagaaaaaataaaactagaattaatcaatagatttttttatgatagtaaaatatgaatattttttaaaagagttttgaaattgtatgggtaaagaaaaaatatatttgttttgttttattattctctctcaaagtgaaagtctcgtttatgagactttagaaaaaaaacaaaaagaagagtcaggggcgattggtagtcactgttagttttggttttagaagctttgattttaaaaatttgagctgcagagaatttggatgtaaagactttgactgttaaaatctgattagtagaacaaaactgtaaaaggtgtaaatgttattttttattattattattatatataaaataaataaaataaatttagaaataaatttatgtaacaataaaactttagtaatgattttatttaccaaaacaaaaaactttagtagtaatttttaaaaatatatattattcatttatttttaaaaaaccaaacattgcattattatatttattgtatcatggtgaaacttaatatccaaacacattagtaagaagtgggataaacttaataaaacttggatgaaggcgtggagcttgaggatcattagaatatatcttgtaatgaaataatctaaacggttttttagaagttttcactccaaattagttctgagttgatcgttaaatttctgaacaatgtttctttgtgaatagcacttaatcttccaactgtactactttgattttgtttttccatacccagattttgtagaaatatggatgtagtctgttggatttgcaagtttcaagataacacactttgtcactgtatttataatggtttaagtgatcttctaaaaatagtaatttgtaagtattttgatctttaagtatttaaaatatattttaaaataattattttggtaaactagtcaacataaaattttgctaacaaaccaaataaatataagaaaagtaaattaaaagatttgaataattaaaatacttatcttgaatgatttttatggctaaagttttttctcaaaactgttttcaatgattttttgacttatcaaaaaatcaacaaatttattaataataatgaaatgacatctaactcttattagtggtgatgatgaaaaataaaattatttttagtgaaatggatcttaaaagaaagataaaaaattaataataattaatttatcaaaaatgttttgaaaaaaaaatatgtaatttgtagagagtttttaattatgtttggagaaaaaaaagaaaagaatttaataatatttgtttgaaagccatatttacatcgtcatttacgtgactttcaaaaaggaaggcaaaggaagaagagaaaaaaaaaagctttaaaaacttccaaaaaattaaagtgaaaaaagtctgattgccaaaaaaaaatactgttaagactttataatccatttgaagccttgacagccctttgccaatcaacccctaaaaaaactaataaagttttgaaagtgtgattggttaaaaaatgactttaacgactttaaataaaaaataaagctttgaaagcctcttccaatcacccccgtaaacagatattagccgttaacaaaaagttaacgtaacatttatattaggtgctaactctaatctacatatacatttttgcagtcattttagcaaataaatcatcgagttggaacttatttacaaggaatgtcattgacattaattattatcaattaattaatattcctaattattagcatttccttatctaatatatctccatcaattctaattatttttaaaaaagagaaatcttaagactttagttatattatacttgattaaagatgtttagaatatttaacgaaaaaacgtttagaatatatataatatatgaaatctataaaattaaataaccatttcaaaaaaaaactttgaaattgatttaaattataaatcttttaataaaaatattattagaacaaaaaaagaaacaataatgtataattttaccgaactgaattagatggtaggacgggtttaaaatattataatgtatggattttataacaattaaataactacttgaaagaaaattttaaatttaatttgaattatatatctttgaaattaaaatattattaaaacaaaataacaaaaccaaaatgtttaatttactgaacggggttagatggcaggacgggtttgggtcgacagtaatacgagacggtatatcacgggtgaaatccattagatatgtttagtttcacttaacgggattagatggtatgacgggtttggatcgatagtaatacgagacggtatactaagggtgaaatcctagatataacaatcaaaatacaattatattatcttaaatactaaacaaaataaatattattaataaaataaatataatttaaatttaaattatttagttataatcttaattttaacttaatgaattatacgttattgttcttatattttaaaacagtaaaactcaaacatagtaattatatactaaataatatagaaatataagagttgtacatttaaaatatacaaaacattaaatcatatatatttttaatcgagtaaacaaattaaacttctatttttagaagaacaaaatagtcccgcggtgtaccgcgggttaaaatctagttcataacaaaagtgaaaccatccgttcaaaccccctagtccaaaaaatcagtcccatccttccatcttcaaccgccaaaaaaactttttcctcgttgcttacttgctgccctgcaacacataattttttgattagcagtcatttttcttttttatcagataacacctactttatcgactctagtttctttatacaccatcaacaaatgtaatatgtaaacatttctttaccctgctaatttgtatattatcatgatattctcaaaattatcgtaatccaaagttatcaacgatcttctttcctgttttaaaaattatggtaaaagttttgttatcgactgcttttttcaaaaatatgataaagaggtatatatataggtacatatctaagatttaaatgttttgtgtctttttcttatagggacaatatatctcgcggaaagaggctaccgattctctattcgtatagggacaattatgtcatatttaatttgcaagaaaaattctacctaaataactaaatgaaaagaatttatatacaaaacgaatataacccatgcaaacttgattgtatgagattttagctggtaacccaaggcaagccaaggcaagaaagagaatagttgtaagaacttcttcatttggcaatggacttgcttgaatggttctttatttccatttttgagacaagtcacattataattttttttcttcaattttgttataatcatcatcacagaatattggagtgaaaatgacatctatataaacaatatttctatttaacgaatgcatatttatcacctttttttcttttgtggaaagatgcatattaatcacttatgtaaacaatattacttagcattggcttgtacaaattaatataataaagttgtttataaaaaaatattataaaattttaaatttaactagtatcttatatctgttttacctatctgttattaagagtcggattcgaaactcatgttaaagtaaatttaaaagagagaaatgtggttcaagttcatttactctatttttcaaaaaaaaaaaaaaaaatcttcctctttcatgtagataaacaaatataattaatagaattatttaaaattatttattttattctcatttactttagtttttttgcctttccttataattactactatacgtttactctaattttattctcaaaatttaccaatcatacccaataagtttaatattattttaaaattcattgtctaattaatgtttgatttgattaatcgacgaccacgagttccacgggttgtttttaaaattgatatatcatatattgaaaaagctatctagaagaagtacccatagaagaagactctcaaactgaccgacacaaatcgatactattgagtgttgagcaaatactagatccccaattttgatacttttacgcctacttcttttgcatgcgtggataggaaacattaatttacatatattggtttttcagaaaaatatagtaaattttttattaaaactaaagaaaagtgtttgaatattttatttaaccgccatattatgtagataacaatgatacattgataccatatcgagttggtggatgtaactttgttttgcctatgcaaataattttgataccaaggtagcctaaactgtcaataaatcatataacttctacaacatgttagcatgattgtcaatgttgttattatgatgctaattatgttagcatatagattaatacatgatcacaatgttatctctctgcacactgcgatcgatttttaatatggatttatccagtacaaattcgacaatagttgttatttcgcaaatagatgaattattgaagaaacatgagattatgttgcattaaacatatatgattttttgtgcaaaagctttgtttctattcaatcactcaaaactattacaagacttaggagaatacacattctcagtgtttgaaacgacaaagttaaaagcagtaaacgaaaaagtacgataatccaacgatagatccataattactttcatacaagagttgtagaacacaatgtcacatgccagaaaatggtaagtcggagacagtaccacgaaagatctgagaagtggtagattggtcatagtccattaacataatgacgttgaaaatgactttgtagcctcgagtctcgcagacacaagacactcttcacaatacgatagcaaggcaattaggaaaatcaagcgatttctcggcttaaaaaccggaaaccaaatacggacactcgttataaaagttctctccataaaggaggaaagtgagataaatgttctctctataaaaaaggagactgagatatatgttctcttcataaaggaggtggaaccaaagttttctttgggaagtttgcacaccgtggaccctcaaaatcatgcaagattacacggtgacaatattgaaattgtcgaccctcgcacggtcttctgaaataagcatgtgacatatggcttgcttcagagtgtaaacggtgaagatgatatatagtagaaacaacagaggccggaaaatgcgggtcgacgaaatttatttttatattacacttattttatgattttatattttaatgataaatatcatattatatcaaatcatgattacatgatactttggacttatatgaatacataagtatataagaaagaatgtgacagcatagattattgattgtatatttgtatagtatagtaagatcgttaaatgtttcctctctgaagtcgtgcgtttacaaggaatttaatggaagatccacttttattgggagatgatcagttaatcactagaaacctcaagtcaacgccgacatggtggatgaattttacggcggagctgaagaacgtcagctctatggcggcgcctatggccaccgtgacagtgtctcaatatctattgcccgtgatctcggtcatggtcgccggccactgcggtgaactccagctgtctggtgtcactcttgccactgctttcgcaaacgtctccggcttcggcatcatggtaattagtttatcctctgtttaaaccacgttcaagatccaagcgaaacttaacaagtcttggaaatttttgcagtatggtttagtgggtgcacttgaaactctatgtggccaagcttatggagcaaaacaatacactaaaatcggaacttacactttctctgcaatagtctcaaacgtacctatagttgttctcatatcgattctctggttttacatggacaaactctttgtttcacttggacaagatcctgacatctccaaggtagctggttcttacgcggtttgtcttataccggcattgttagctcaagcagtgcaacaacctttgactcggtttctccagactcagggtttggttcttcctcttctctactgtgccataaccacccttttattccatataccagtttgtttgattctggtttacgcgtttggtcttggaagcaatggagccgccttggctattggtttgtcttactggtttaatgtcttgattcttgctttatatgtgagattttcaagcgcttgcgagaagactcgcggctttgtatccgatgatttcgtgttgagtgtcaagcagttttttcagtatgggataccatcagcagcaatgacaacgtaaaaacattcatcttcttcatcgttggtgcattcttttctttcttggcttgatttgttttttgtttctatatgcagcatagaatggtcgttgtttgagctccttatcttatcttcaggactcctcccaaacccgaaactcgagacctctgttctttccatttggtaatctatctttctctctggatctttgtctccctttttacatatatgtctagtatatatcaggagggattgtcttaaatatataggtctagacgtctagtgagtaaatattggttaattaaattagatatagtttatcgaattcatatagacagaattgttacgctttactgatgcaatatttttggttgttgttgtttttttaataatagtcttacaacatcatctctccactgtgtcattccaatgggtatcggggctgctggaaggtatgattccgataaaaccgactaaatatttgtttgggaattttcagactagtcacaatgtttactttggcagcacacggatttcaaacgaattgggagcgggaaatccggaggttgctaggctggcagtgtttgccggtattttcctttggttcctagaggctaccatttgtagcacacttctgttcacttgcaaaaatatttttggctacgcgttcagcaatagcaaagaagttgtggactatgtcacggagctatcttcgctgctttgtctttcatttatggtcgatggattttcttcagtgcttgatggtattaagatcaaacccttcaattagtgaatgataaaaaatcctatctcgcgactcaaatatgacttttatgaaaaaggggttgctaggggaagtgggtggcaaaatattggagcttgggcaaatgtggtggcttactatctcctaggagctcctgttggatttttcttaggattttggggtcatatgaacggcaaagggctatggattggtgtgatcgttgggtccactgctcaagggatcatactagctatagtcactgcttgcctgagttgggaggagcaggtcaatagcaatcttaaatatatttttggacatttgatgaatcttttttttaccccatactgaagttgtttacaattggaaattgcaggctgccaaggccagagaaagaatagttggaagaacattggagtgaaaatcacacacttttaaacgtaactgatatagttgtactccttccgtttagtatacacgaaatatagaagaatacatggtcacacatgccaaatatacacgaataaatgtaagtttaaggttttcacacacgtattaaaaaacaaataaatttattagcttaaactttgtcaatatattttctataaagttattgatcaatacattaaatccgtgggataaagctgtaatgtatcaaacaattgcattgaaaatataaaacaatatatattttaaaataaattttttttttaaaaatgacacttaatcttgtatgcgttttatctttctaatgattaaatatctatgtataagtttaacatcaagtaaaaatttgagtgactaatttatgtttgattggattttccacagtttatcttataaactgaactctcatatggctaagatattttactttctttcatttaacagttacggggcgattgaatgttcttttaacaaggtctgatttgaacggacattagttttgtttatacaacaatgtgtttctctatatacagaatataacttatatatagtaaattgtttatgttgatcccagtaaaaaaagataaaaagagaagagatggtgctactgaggaaccaagaaagaactggaagtcaacaatcaactcatactcatgtgtctctcctttttaatgagagtgactaaccaacgatttaaaataaataaaaagagtggttcaaatgtaaataattcaaactactaagacttggtggaattcatgtgaaggagacaaaagttcaatctcatggagaaacagaattccattgaagaagaaaaaatgtgaataaccctaacttttagaatgctgacctaattaatgcacttaatcagcttcgtaaacagtttctacttgtgaattcttgccaacttttcgagaacaccaggatatatagttgagaataatgctagcaaatcgtctaaaagtttctagagtacatatctagattcgtcttaataatgctaaatatttatcttcaacaacattgttttcatttttcaatacaataaagttgaattaaaatcatttttttaatctactaagactgtaatttaacaatatttttaaacatattgtactggtttagaggcgatttatcttgttggaaaagaagtttggaagattctgtcttgagttccatttcattaaaacaaagtcatcacatttctggtatgtgagacgaagctatggtccatgattaaccctctatgatagattatgatagatgtaggggagtgatttagcaccactcagttaactcgactctaacctcaataaacaaaaccttcgaaatgttttgtcgggctcggcacatttagcgtgaaaatgagttttttttgtgtgaaaatagatagatcgagattgacttaacataaaatggaaagattgactcgaaaatactttcaatatcatcaatattgaggaggagaaaagaaaaaaataccgaagataaaaattttggaaggaaaacatattcgaagacctagatggagaagtataaatacaaatgagcagtcgcaaagtggggcatccacaattcgtctctaaagatccctagacatccaaattcacaagaaaaaaaaaactaacttgttatcaaagttagttcaatctctttgtaattgtatcagttcgttcttgagcttaataaataaaattatttccgcgacactacttcccttaattaagcttgccggtttatatgtgcagatttgactcacacaatagacattagacaatatagtatgtttttgaaatatattttttgaggttatttcatgataagtaatactgcaaaatataaatttttcaaacataaatttatacattgaacctcatatctatttgtttctattatttaatttattttaatgacaatgtgttctatactatatttaaattttagtaaataattttcttaaattatataatttttcaatactttcttaataaacttctagatgtgaaatagttttataaaaaaaaaaatacatattctggttatattttttcatatagaaaagaaatggtgtgattcatattttttcaagttttctaagaaatcaaataatgagtaagtcaacaaataaaatctcatatagtggctaagaacttgaagtcatttagtgagaaggaaaccaataaaaaaatttacctataaattaaagggcaattaaatgtaagaacagtttaaataattaaaaattattaactaaagtaatgaatctattaattaattgaaaataaatatatgtgaaagaatatttgtacaaaaaagcaaataaaatatctagtagatatatttctgaaataagtatttagaaatttaattttttgttttacttgatttttcaaaattttataccaaaatacaatttattttaatcttataattttatttctaatcaaggtgttccaatttcatttcgctaaatgttatagaaccgatcccaatacgaacgcgaacctcacttatcagctctcaatctctcaactcgaagtttgtttgtgtgaatcaaagaagaaacagagaacaacacacaagaatttgttacccagttcaatctaatctgtgtgattagatctacgtctggagccagatagatccggcaatccactatatgagatgtttacaaacttctctgagctcaatacaagatcaatgaagaaccctaattttctgggtttaagagagatcgtaacaactttctaacggaatgaagaagaagaagataacagacttctatttatatgtgtttgacttcgagcatcgaagcctctttcagaatgagagtcttccaatcataacttccttcttctgtaaaccaaagcgaaccgtttcaataaccaactccaatctgctgttaaaccgaatgtcatcagaccaacattaaaccggaattggatcatattcataacattatatcaaacaaggaaaaaaaaactattcactattgtcggcaataattaactttttgaaaaatcgaaacaacaaggccaccacgtctacaaaaatcagaaaccaattcatgcacatgatatatgtgtttaataaatataatttatatggaccctcttaataatataatttatatggagcatttattattatgggtacatcatatcatatctgtttttaccttaataaatagaataacatttttttctgtgacacacattgaagagagaaaactatttgtcccacagtcaattacgggtctaaaatttggtagtaacaataatactttcatatgcatatcttaacatgagaaaaaaatgttttcactggtcgagcagagttatatatatatttagatattgacgaaaagtcttcattgacaataaattacattggtttcgtccatcagtacaagattggatatgatctaaaaaatcagaggcaaatcaatcaagattaagaagacgacaatggaagagccatttcttccgagagacgagcagttagtctcttgtaaatccacatggcaaagtggtcaggtcaccgtcgagctgaagaaagtgagccgcttggccgctcctatggccaccgtaaccatagctcagtacttattgcctgtcatctcagtcatggtcgccggccacatcggcgagttggagctcgccggtgtcgcgcttgccacgtctttcacaaacgtttccggcttcagcataatggtaattatgctattactctctcctcttcatttcaagaactcaattaactttccaatattgaaatattgctgcattcttttttgtgtagtttgggttagttggtgcattggaaactctttgtggccaagcctatggagcagaacaatacgaaaaaatcggaacctatacatactctgcaatggcttccaacataccaatttgtttcatcatatcaattctatggatttacatcgaaaagctcttgatcactctcgggcaagagcctgacatctctagagtcgctggctcctactcattgtggctcgtaccggctttgtttgcccatgctattttcttaccactgactcggtttctgctagcacaagggttggttatttccctgctatactctgccatgaccacccttttgttccatattgcggtttgctggactttggttttcgcgcttggtcttggaagcaatggagctgctattgctattagtttgtctttctggttttacgctgtgatactctcatgtcatgtgagatttttcagctcttgcgagaagactcgcggatttgtatcaaatgattttatgtctagtatcaagcagtacttccagtacggagtcccatccgctggattgatttggtaagtaaaccattttcacgtgtcttgttggttaagttacaatacaccgatgcttcctcttatcttgcttgcatttttttgtcttctttgatagcttagaatggtggctgtttgagctactcatactctgctcaggtcttctcccaaacccaaaactcgagacatctgttctttcgatttggtaagtatcatattacttctttttatcctatgtgttctctttaccaaaatgtattaatcttatgtctttcatgttatcagtcttacaataggaactttacactatgtgattccatctggagtcgcggcggctgtgaggtatgatctcaactctcaaaccagaacaagtgttcaacaattcctttctcaacattagtcatttggtttcttgaagcacacgagtgtcaaacaaattgggagctggaaatcctcaagttgctagggtttccgtattggcagggctttgtctctggcttgtagagtcagctttctttagcacacttctcttcacctgccgaaacatcataggctacacattcagcaacagcaaagaagttgttgactatgttgctgacatatctcctttgctctgtctctccttcatcctcgacggattaacggcagttctaaatggagtggctaggggatgtgggtggcaacacattggagctttgatcaacgtggtggcttattatcttgtaggagctcctgttggagtttacttagctttcagtcgtgagtggaatggaaaaggactctggtgcggtgttatggttggatccgcggtgcaagccactttactggctatcgtcacagcctccatgaactggaaggaacaggttagagtttgttacattctagttttttgaatgctctgaagtaactggactctattatttgcaggctgagaaagcaaggaagagaataatctctactgaaaatggattggtttaaataaaggttgttcctaagagctatctcaaagtatttgcaagtcatgtgcaaaaaaacatgtaatgttattttgatgggttataatatttttttgtaaaacttttatccaggatttatacattttttcttgagttgatattttcgttagttagaaaaattattcgaattgcacatgctgaaagatgatttatttattttcttcaaactttaatatacaaatgtaacaagtaaataaaaactcattagttccaaacaccatgggattaaaaatggcctcagctgcaatcagtcctatctttataaaaaacaactatgtgagtcctatccattatcccaataagtccactaaaaatggcctgtatggcacaaccagatttaacacttagtattaactttaaaattcacaaaagaaaataatctctcttatatatggtccaaacataataactttacactaatgatccataagagttttcacatacatgtttcttgacgtaaatcattaaaaatatatagatgaaaaatacttatagaagattcaaattccacatagtccactaatgttatgtcatttaattagtaggtttagtggtgaaaacttaatacgaattcctacctttttatcagcctcagctgcacgtttgaactgtctagttgttatttaaaccaaaaaaatgtttttgttaattaagacatttttcctttttaatataaactgttaaaacaaactgtctcttttttttttgtaacaatgtcattatcttttgtttaatctatgatatgattagaacttgattcccaagtaattattcgagttgcctttgttgtttagtcatagatcattggaacgtgatccccaagtgtattatcatgtatttccaaaatgctgatattggacgactgttgagtgttgacgacgacgtccaccatttgtatttcaaaatgaccgaattgtctcttttgtttgtctttgttattaggttattgtgatatctgacttttatggaagtaataaaaagtttaatatacatgacttttataacagttttataaaactgttataacttgtgaagttgttagaagattttgtcatttgcaaaaaacatgatgtatgttcctttaacaataaaaaacatgatgtatgttcaccttaaaaaaaactattgttttccggaaacttattaagagaaactatacaacgtcattgctgaaaactttgatgtataaactttagtaatactttatactttatcatgtagacttttataatatactttttgaggatcttcgtggaaaatatagaattccactggtcgagctaagagtcatgtaatttgaatattctattcccacaatttccaaaaaagaaaagtctacgttgacattgacattggtttcgtcgtctgtctagtgtctataaaagatggaagaatgtccgcataaattatagacaattaaagtactagacaaggctttcaacacaaaacaataacaaacaaaaaataaggacaaaaaaaaaattaacaacctaaaacaatggaagagccatttcttccgcaagatgagcagatagtcccctgtaaagccacatggaaaagtggtcagctcaatgtcgagctgaagaaagtgagccgcttggctgttcctatggccaccgtgaccattgcacagtacttattgccagtcatctcagtcatggtcgctggccacaacggcgagctccagctctccggtgtcgctcttgctacctccttcacaaatgtctccggtttcagcattatggtaattatgttatgactactctctcctcttatgttcaaaatcaagttgactctgaaatcttgataaatacttcaattctttgtgcagtttgggttagtgggttcactagaaactctttctggccaagcttatggagccaaacaatacgaaaaaatgggaacctatacatactccgcaatttcctctaacatccctatatgtgtcctcatatcaattctctggatatacatggaaaaactcttgatctctctcggacaagaccctgacatctccagagtcgctggctcctacgccttgcggctcataccgactttgtttgcccatgcgattgtcttaccactgacccggtttctgctagcacaagggttggttcttccactgctttactttgccctgaccacccttttgttccacattgcggtttgctggactttggtttccgcacttggtttgggaagcaatggagctgccttggctattagtgtgtctttctggtttttcgctatgacactctcatgttatgtgagattctccagctcttgcgagaagactcgccgatttgtatcccaagatttcttgtcttctgtcaagcagttcttccgttatggagtcccatcagcggcaatgctttggtaagtctattaaaagtttcttgttggtcaagttacatacgccaatgcttcttcttatctcacttgcattttctcggtctgccttttacagcctagaatggtggctatttgagctacttatactctgttcaggtcttctccaaaacccaaaactcgagacctctgttctttcaatttggtaagtttcatatagaaggacttctttttatctttactagtgcgatctatactaaaaaagctaacgaatcctatttctttcatgcaagtcttacaacagcaactttgcactatgtgattccagttggagtcgcggccgctgtgaggtatgaactctaatttttaaccaaccatattcaacatcttcttcctaaacaatataagtcatttggtttcttgcagcacacgcgtgtcaaacaaattgggagctgggattcctcaagttgctagggtttcagtattggcagggctttgtctctggcttgtagagtcatctttctttagcatacttctcttcgccttcaggaacatcataggctacgcattcagcaacagtaaagaagttgtggactatgtggctgatctatctcctttgctctgtctctcctttgttcttgacggatttaccgcagttcttaatggggttgccaggggatgtggttggcaacacattggagctttgaacaacgtagtagcttattatctcgtaggagctccggttggaatatatttagctttcagttgtgagttgaacggaaaaggactatggtgtggtgtagtggttggatccgctgtgcaagccattatactggctattgtcacggcttccatgaattggaaggaacaggttagagcttattacaatacattcttttttttttttaattctctaaagtaactggaatctatgatttgcaggccaagaaggcaaggaagagactaatctcaagtgaaaatggattggcttaaagaatggtgtttctgagagctatctcaaactatttgtaactctcattgctcaattgttttacggctatatactgtcaaaataaagctgcaaaaatttcttacagcatagtcggtgtgttataattttttgtataaatccctgttttatcaatacttaaaatttgcttatgtagaaattgtttttttaattagaacaaataattttgcacatttttttttttgctaaagcacggttatctatttcttaatcctttacgagagagagataaatttctttgttttctttactttttcatatactaaatgggaataatttggtggaagtacctttggtccaatggttgataaaatgttcattaatgcttctacattaagaggtgtaggcttcgagtctcagctactgcgatttataaacagatttgtagattaatggaggcaagtgtgcacaattatagccgttcgccaggattctatgtagagaagatattgaaggtatccatcaagcgcatagagaagaagaaggaggtgtcgtctgtcgtggatctaataaaggtcggaaggaattgtccatagtagaatcgctatgtaacagctttctttagcacacttctcttcacctgccgaaacatcataggctacacattcagcaacagcaaagaagttgttgactatgttgctgacatatctcctttgctctgtctctccttcatcctcgacggattaacggcagttctaaatggagtggctaggggatgtgggtggcaacacattggagctttgatcaacgtggtggcttattatcttgtaggagctcctgttggagtttacttagctttcagtcgtgagtggaatggaaaaggactctggtgcggtgttatggttggatccgcggtgcaagccactttactggctatcgtcacagcctccatgaactggaaggaacaggttagagtttgttacattctagttttttgaatgctctgaagtaactagactctattatttgcaggctgagaaggcaaggaagagaataatctcaactaaaaatggattggtttaaataaaggttgttcctcagagctatctcaaagtatttggaagtcatgtgcaagaaaatatttaatgttattttaatatttttcgtaaaacttatatccaggttttatacattttttcacatgcaggttttatacattttttcacatgcaggttttttgtaaaaattattcgaattgcacatgctgaaagatgatttatttattttcttgaatcttggtatacaaatgtaacaagttaataaaaactcatttacttgtgcagcgaggcgcttctggacccaaaaccccccaaaaaaaacatggctataatgactacgtgagtcctatccattatcccaataagtccactaaaaatggatggtatgacacaaccagatttaacacattatttgaagtagattccatcaaccgatcaggacgctgctggatatcaggaagctacatcatatcacatcagacgtttgagttgctgacatggatgcaggagttgacatggacgagctaaggcgattgatgtaacgagccaaagaagttagctgacttggcgtggtatcaaaaacaaaattggtcgagaagatatggaagatattctttctcgaaaaataagaaatgaataggcttgggaaacaagaaagattccttttagtgattctcggagatcctagggtttagagttctggagaataggtataagtattctagaattagcgttgagccgctttgagcactctaaaatactgttatacaattataaactttaaagcattgcaaaagcttgaaggtgagtgtgttagttctctttatctttacgggtgagtgataagaaacagaggtgagaattaggcttagttatttttattcgggattgatcatttgggtagaataagtcaagtaagatccgagataatacttgtaaaagaatttattatcaataagaataaagtttaagtattacttattgtttggaagtaaattctatctgttgtgttggtctataccttttagtattgactttaaaattcacaaaagaaaattaaaactctcttatatatggtccaaacataataattttacagtaatgatccataagagttttcacatatgtttcttgacgtacatcatcaaatatatataaatgaaaaatacttatagaagattcaaattccacatagtgcactaatgttatgtcatttaattagtaggcttagcggtcaaaagttaaaacgaatttcctacctttctatcagcctcagctgcacgtttgaactgtctagttgttatttaaaaaaaagaaaaatgtttttcttaattaagacagttttcttttaattaaaacaatgtttaatctacgatgattgtaatttgattcccaagtaattatttgagttgcctttgttgtttagtcatagataatcggaacgtgatccccaagtttattatcatgtatttccaaaatgctgatattggacgactgttgagtgttgacgacgacgtccaccatttgtattttaaattgatgctgccacttcttaaaattgactattaacggaattttctttgccccgttcttaggttattgccggatatatatatacattcatgtaaatttcggatttgatctgatttatataaatattaaaatttaataaccaaacttttctttgacgtttgttacattgtcataaaaaaatattgatctaatcttgttacaaataatgatcaagccattaaacttagttacttgcattagaacacatacaattatacgattatgataaacggctctgtaaatagttgtactctcatactcagatttctgactaacgattatatttgtaccatatgcatgatcagtggcggaggcaggatagttagccatggggtcaaattattttgtaagccaaatacaaaaaaacattttgaaaaaaaaatgaaaatattatcacaagtgatacttaaaaaaaaaacaaattaccattacaaaaaataaaaacaagacataatgagaaaaaggtaaagtatacattcaaactaaggtaatttaatttgtgttaagcaataatatttgagatttaacctagtttagtgggtatattattatatataaaattaattgggttaacatgttgtagttttaaaatttttttattggaatttagttggattcatatttgatgggggtcaataattttttggggaaagggtcaatttataaaaattaacaaaatttaaactacttttctaaaatccatgggggtcaatagaccccatgattacataatacctccgccactgtgcatgatgaacaaaattacctataaaatgagtcggctcaacccatgaactcatttaaacctgaagtcattggatatgagttgagttgtgttgagttatccatttttgacacccctagaaaaaccaaataggtttttaaccaaatcttgcgttataacgaaaatgataataaatgttttatgctttgattttctaagtttttcaaactagaacaaaaattcaaggaaagtttcttgctcgttatatcaaccaaagagaaaccaatagtaaaaataatgtcatgatgaataattgattaattcttcttatgatataatggatgtggcttttgttcagttagattttttttttttttttgggttcaattcagaaacataaaagaatgtggcttttgttcagtgtttttttttgtcaacatggttttggttcagtttagagacatatcgattataaataatgttggtctaggtttataagctcaatttggtttgatgggttcacatgccaattaaccgttgattgaataatctcatcatgtgaatataatagggcttggaggaggagttgggggattgatagcaggagcggcaacagcggtagtggctgcaatgggtggtcaccatgtgggtcatcgcgcaggctacgagcaccacaaccatggaaaatacataagaggattacttggaggaggaaagtacaagcgaggaaagcaaagtatcggaggagggaattacaagtgtggcaagcacggcatgttcggaggcaaaagaggcaagcatgacatgttcggggggaaacgaggcaagggcatgttcggacaaaggaagtggaaatgatccattagcattcctctctacatatattttcgtaacaacttaatattaagcttaatatataatgtgggtgaatcatttaatttacatgtatttgtagctatatgtatctatgaaagagtgtttaaattgggtaaaatatttttcttacggataaacgttaatggtaatgttttttttataaagaatttgtatatatgcatgtattgtgagccagtgtaataacttttctgtggagtgtgttttttttttgggaataaaacgttgagaataataaggattcaatttagagaattcaaaaattatgtgaattttcaagatttttttttattttggggagagatatacgggggatttgttttggaatgttgagaatagtatgaatatagagaattaaaaatttatgtgaatttttaagaatttgtttttttggggagagagatatatgggtttttttggggaataatatggatttagagaattaagaaatttatgtgaattttcaagaaattgttttagggagagatatatggtttatccaacaaaaaaatacttgattagattaatacacacaataattcgaaatagataaaactgtaaaaatatgataaatttttatcacatcagaataaatcaaacttaatatggataattgttataggactatatcatataagacaattatccaaaatgatatagtcctataacaattatccaaaatgttattaggttatatttatcatgatgtgataagaagttattattttctgcagtcttatataagctaaatttatagtttacattttatatattccaaaatttttttagtgttaatctaatcaagtaattttgttgttagataaacgtgtaaaatatataagaaaatagtgttaggcgatgccaatgggtctgcatgcccaagaggtgtccgattgtaattactttcattcttagtggaagctctgactctctcctttaaccaaaaaaattgaaaatagtaaaagctaattaatttagtaaaaattggataataagcgataattataaggaaacttaaattagtatatttggtttagtagataaaagtaggaaaataaacttcaatatatataaactaaacaataaataaattctaaatttaaatattttcttaatcaataaaaataaatggataattgaatcccctaaaccagagctattgagctagtttactgtaactctcacttaagtggatggttcattgggatgtagatgtaaattatttgttgtacgaaatttgttgtaggtgtgttgattatacttgtaagaattttgtgtaaatctttggatatacctatatatatttgttgcggtagaaattgtgttgtagacattttaaagtacaaaacaattgatgaatgttatattttaaaactataaaaaataaaaattgattgacaaatacgcttcttctttctttgtagattttgtttgaatgtatacaaattttttgtgctagtaaaagagaatataaaaaatatattttaaataataactacaatattaaactaataaaaaatagttaatacagttttgaaaatatgtatgttaaagacgaaatttatatgtatatataaacaatatatgtaaaattatttatattatatatatatatatatatattttttcctaatttaatgctacaatctatatatacatttttgcaaccattttagcaaataaatcctaaagttggacttatttacaacccaatgccattagcattaaatattttttccaaaataattaactttactttaaaattttaatttaaattgtcaatcacattatcaatcaaatttaatccaaacaaagttcacatcaatcccttaaaattagcataaacgtattttattaacaatattttaaaacaaagttttttgtttaaaaaatattattcttactaaacgttgtttgcttaaataaacaaatcatgtatttgaacttatttacaatgtcacgctactgacattaattatttaggcataaaaatatttatttaaagatttaaatcttctaaatttttgcttttagagttattatatcattacctaaaaggcaaaaaatattaatttttaaatattattatttgtatatttaaacttcataaaacattattaatatttgaatttataaaaagtttaatctatcaaaaataattaacatcattatttaatatatagagttaaaaaaaatctcaaaaacaaatcgtcatattttgtgattcgaaattttatgaatgaacatatattaaccaattggcgaaaaatgtgtgggttcaacgtcccgcaacgactaaaatattttgacaatgattcataaacatattataaataagatcaacattaataaaataaatagtttttttttgttgacgggtttgtcaggacgggtttggcaggacgttacttagtaacaatggtaaactataaaataatttacaaatttttatatatattaattttaaaaaataaattgtctccgcggtgtaccgcgggttaaaatctagtgttttagtattttgggtcatattattgttgtttgttaatgtatgtatgtatgtgtatacacgtatttctatgtacacacattatattaaatgaagaaaaaattaattggtaaccaaaattgtacctaaaagataaataaaggctataataaaacacaaaatattttttacagttgttggtcattcctcacgacaaagaaacgagagctttaggaattattgttggtcgttctttaacttttttttgtctctaagttctaaaattaaagtacatcatgattgctaaatttttaaggatatacttaaaattaaggccgtagatagctcttacagcgaaactaatcatgacccatgtaaacaatgatacaatgaggagacaaaagttttagtaggatgtacatagtgttgattcattcaaaggccaaatagattcttaaaccaattattattattccagaagtgaaggttgattataacaaaaatgataacaaatgtttatttaatttactaagaatatgtatatatatacatatattttgataaaatatcttaaattttatttaaatttgtcttatgaattaacgttgtaagttgagttgttaaaatacatgtcttttatttttggagtgaattatatacattttcatgtggactttttctggaaccatagggattcaaatagatttataattttaatgaaaaatagcatttggaatttttaagaaaaaaaatctattaaaagctcaataagaaaaacaaaacttatctgaaactacaactaaacatttttttttgtttttcggtgtttaccaagtcagataaaaaaatttctaagtaaaaagataacaaataattaaacccacaataatagggataacgagctgattttttcttgtcggagaaacgtctgttaggtacacttttgtgttgtctcgtagtaagtagttgtgcatatgccacaatcgtctctcacgatggttgtgccatcactatttatggtcatcgtcgagttcttctctctggttctatccattacttttgtagtaccgatgaggtaacttacatatcagcttatatctacgttagtagttaatctattatatatgtttagcataataggattgttaattaactacattttttgttgttactttgtcaaatttagatgtggccgaatcttataaagaagggcaaagaaagaggtcttgatgcaatcgagacttatgttttttggaatgcacatgaacctactcgtcgtcaatatgatttttctggaaatctggatcttattcttttcttcagaaccattcaaaatgaaggaatatgtatggagttctacgcattggaccatatgtttgcgcatagtagaattacgggtaataaactaaacttgcttcattttacttattaatatcatcaatgcattcttagtgcaaagtgctggtggttataacttaacatatacgatcaagtttatatatatgttggtctttctccatttgcttataatgatattagtttttttctttttttcttttcactaattttgatattttaattatgtaatcattttcaatagaggtttttcagtgtgggtgcataatatgcccataatagaattcagaactactaatactgcgtttatggtaatcatttatcaaattttacatgtaatacttttgttttaattaatagtatatggatgatttttatgtagaatgagatgcaaaatcttacaactatgataatagaaatggtcaagaaagagaagctatttgcatcacaaggaggtctaattatccttgcttaggtaataatttttttaacatgatgctatccactatttacatctatttggttatagaatatacaatcttttgtttttttctattaaagcctattactgctaccatagttcaaatacaaaagccagaactacaacaattttgattttagttttcctaaatttgcagattgaaaatgagtatggaaatgtgattggatcatacggagaagcgggtatggcatatatttagtggtgtgcaaacatgactaattctcttgatgttggtgttccatggatcatgtgtcaacaagatgatgctcctcaaccaatggtaaaattagctaaagttaatgattttcatgaaattaacttagacatttattaacactaatgatctataaattgtttgattttataagtaaacacatggaatagttattattgtgacaactttacaccaaacaaccccaacactaaaaaaatgtggactgagaattggaccggatggttagttttcgtttagttattgctgtaatttaatatcttttactaataataagaacgtatatttttatgcaatctgaatattgttgacccaaaacttttataaatgacctcattgatatgtccttgatcgagagatgttttctcatggttagtttttatttattcttatctgtaaaaatatatttattctatatttgtataggtatatgaattagggaggtaaagatccttaaagaacaaccgaagatgttgcttttgctgttgcaagatatttccaaagatgaggagctttccaaaactactacatggtaaaaaaaaaattataatatctacatgttaaaaaagtaataatgaaactttaacttaattgataaagtaagaacatacattaatgatcattaaaaaaaaataatgaatgtttatctttgtttttgtagtatcatggacataccaactttgatagaaccgcgggtggtccgttcatcacaacaacatatgattacgatgctcctcttgacgaatttggtaaatatttataaactatattcatatttaaattaggttaaagattttaaaataaaaggtactaacaatgatgaatatttattaggtaatttgaaccaaccaaaatacggacacctgaaacagcttcatgatgtttttcatgctatggagaaaactctcacttatggaaatatttccaccgctgattttggaaatttagtcatggtaattctcattttctgcttttttcaatttttatatttaaaatatgttactcttgaatttatttttgaacatgtattattatagacaacggtttatcaaacagaagaaggatcaagttgtttcattggaaacgtgaatgcaaaaatcaatttccaaggaacatcttatgatgtcccggcttggtatgtgagcattttaccggattgcaaaactgagtcttataataccgccaaggtttgtctttgttacattcaaagttttttttacagtttttcttaacagtgatcattattacattcaagttataatccttaatacattggctttttttttatggttttatatatttctgattaacactcaaacttctgtgatggttaagaaagcgaatgaagctgagaacgagccttcgatttaaaaatggtcatggagaccagagaacatagacaatgtcctcttgaaaggaaaatgagaatctacagtgagacaattgtttgatcaaaaagtagtaagcaatgacgaaagtgattttctttggtacatgactacggttaatctcaaagaacaagatccggcttggggaaaaaatatgtctcttcgtatcaacagtactgctcatgttcttcacggttttgtcaatggacaacatactggtaagtaaatgacttatctagttttaaacaacactcaacacataaagaaaacattttatagattattcgttcttttttattataggtaattatcgcgttgaaaatggaaagtttcactatgtttttgagcaagacgcgaagttcaaccctggtgttaatgtcattaccctccttagcgtaaccgtagaccttccggtgagttcgaaatcttatcattcttatgttaaaaccattcttttaatgtcctatttttaactatgttttttttgtaagaactatggtgctttcttcgaaaacgtcccggctggaatcactggacccgtttttatcattggaagaaatggtgatgaaactgttgtaaaatatttgtctactcataatggagctacaaaactggtttaagcggggttgagaaccaactctttagttcagaatcaccttcgacatggtcaggtgaaagtgtaccattcaactgaaccatgacttagtacaaggtaagtagatattaaaatcaatagctaccaaaaagttatagatgcaatttaaaatcttattattctaatgtttctttcagactattttcaaagctcctttgggaagtgaaccagttgtggtcgatcttttgggatttggaaaaggaaaggcttcgatcaatgaaaattacactggccgttactggccagtttttctagaaaccaaaaaagaaaaaaaaaaatcgatgcgtgatttacctctcttttgtgttttgtaaactgaatggttcctattgagaagtaatttaggtacaacaaaaagctgttcttgaattggaaacatattaattcccaaacccttaaaagcttgaagctcaggtctgctcacactccttcagtgcaaagcccaatacaaactttgtgtggaattcttaatctccatggtcgaggacttcatgtgagagaggatccacctgttctgttacggttttccacccatctcttgcataactgggttctagcttcctctccatatcgctacgtaatgtctgagctcatctctcaatatgcgaaaaacctagcaatcatcctcaagcatctaagcaatattacccttgctcgaacccgtgtccaagcactttctcgtgtagttctcttcgggccagtgagattcacgactttgaccacttttacaacgccacttggtctcttgacaatggctatatgttcatccattgactcgtctttggaagaattgtcgataatctttgatctcacatgtaccaaaatgctttatagcttttggctcaaagctctcaaagaactcttgtcgattaaacctatcgatccttttatctatctttttatctaccttatgttggctttgtggaatgctccttatggttgtattgttaacttctggatctgattccctcctcctttgtacttggtttctatcttaattgaatgatatcatctctttgacaaaaaaaataaaataaaataaaataaataataattcccaaatcccacaacacattaccagatatggaggaatgatgatgatgtgagttgttttttctgttattattttccctactttttttttccatcaattgaagttaaatacattttatgataaataattaaacaaacaaagataaaattgtatttctttggtttatctctttggagttctaataataacaggtgtttcgcaatttatttctataatgaaaaataataatatatatttccaattaatccatattgcaactcatgtgtaatagattcattgaaatatctaataaataaacaaaaattctaacaataatcttaaactgttgaaagcaaataaccattatgaaaagatattacttttataattcaaaatcatgtatcacatgtagtattgtacatgctacatattaattgttttaacataacttttgagaaaaaaatgcggtaaaaaaccttcaaagtgacaaattttttatccgctcttaacttttttttttattatatacaaatcaaatttaaggaaataactcaataataagatattttaactttaaattcctaattttattatatccatataaaatcaatttctttttattgttttaaattcttaaagaaaatatttctttatcttccatttacataaagtattgttggtcaattggtaactcgatagcgacataacgttttcagtacatttatcagattttatataacttgttttttcttttgaaccgacattatgagatctttagtcaagttggaggattttccattgaaaatcatcttatatcataagctttaaaaattttaattgtgaaggtttaaatcatatgtttgtaatacatgcatttccatttcaccccaaaaaaaaggtaatattgaatatattaagttttaatttataataaaacatatcaatttcacacaaaaagagccaaaatatagtgcattgaaaacttttaatcaagtaaaatgtcttcattaaacatatcataatttgtaaacatcaaaattattacttctaataatttctatcgatatattaacaattataaaaaaatattatatataatttaatgttaatatcattctatattcaaaactaaaaccaaatatacaattcacgcatcgtttggataactttctagtatatatatatatatattagaatgaaaaagtcttgtagagcattagaccactaataattaaaaaaatttataattatattgcattttttaatacaattagacccactaataaaactacaagtattaaaggttcacccgactctcaaatttgaacctaatactaaattatacctctctctcttttcttactttttaatatttagtttttaatggtcaaaaccctttttttgtgcaaaagataatttcattcaaacttaacccatatgtagtacaaattttaaacaaacatcaacctcatggttggaaacatcaaagaaaaccacaagttctctcacaagagaatggtaaaggaaaatgatataagataatttgacggtagatccatacatcgaagacaagaacaatgtagtaacttgctacaagcgagagaatggtgagtcgaagacaattacacgaatattttgggagattgttgaatggtcacggtccaaacgagacatagtgacgttgataaagagtctttaaccttggataacaatggctcgaaacacgcagcttctacaaaggtgattaaggtatccaaatggttttgcaaacttaaagtcggagacaaaccaaaagttcgttctataaaagaggatgattcaaaagttctctctataaaagaggatgattctatcataaaattcttagacttatatgaatagtatgagctgctctttaaggcactaagatctaccaccaaggttaataaaagcaccttgtctagactatctataggtgtcaacgtgatgagagaaaggagtccacgaccaatctcaaaaccataaccctgccatcagatatctagtgtttgacaaggaagaaagaaaaacagacctggaccaaattggtaaataggcctacccattagcattagctttaggccgtggtaaatttattagtgggccaaaggctgcccagcccaattcgaaatggggatccaaacaaacagcggttttgccctctttagaatgccgcttttgtgaaattgtgagaacccttgttaaaaaaactcgcgatgaagttgctctcaaatactttaatggctcacggtaaggatgctgttgttgtgagtcacgtgtttgcactgtgtagttgctatttaaaacaaattctttttgttcaaaattattttttttgataaattgtcaatctctgaatattagaacttgattcccaagtaatctttttcgagttgttttgttgtttagtcattgattatacgaacttggtccccaagtatatttcttgttcatgcacttccttattatcctattggatgactgttgaccacaacgtccactaaagagaagaaactatacaacgtcattgcgaaaaactactatacttttatactttaacgtgtagacataataatatacttttttgagtatcttcggtggaaaatatagaataccttttactggttgagctaagagtcgtgtaaattcaatattctagtcccacaaatttccaaaaagaaaagtctaaacattggttttcgttgtctgtctataaaagataagaagaataacatcagagattatacgcacacggctttcaacattaggaaggacaacaatggaagagccctttcttctgcaagatgagcaccttgtcccctgtaaagacacatggaaaagtggtcaggttaccgtcgagctgaagaaagtgagcagcttggccgctcctatggccgccgtgaccattgctcagtacttattgcctgtcatttcagtcatggtcgctggccacaatggtgagctccagctctccggcgtcgctcttgcaacctccttcacaaacgtttccgggttcagtattttggtaatgatatgctataactactctctcctcttaagttcaagatcaagttgcctctcaaatcttgataacactatattaattctttgtgcagtttgggttagcgggtgcactagaaactctttgtggccaagcttatggagccaaacaatacgaaaaaatcggaacctacacatactctgcaactgcctctaacatccctatatgtgtcctcatatcagttctctggatttacatcgaaaagctcttaatctctctcggtcaagaccctgacatctctagagtcgctggctcctatgccttgtggctcataccggctttgttcgcccatgcgtttttcatcccactgactcggtttctgctagcacaagggttggttcttccactgctctactgtaccctgaccactcttttgttccacatccctgtttgctgggcttttgtttacgcgtttggtctgggaagcaatggagctgccatggctattagtgtgtctttctggttctatgttgtgattctctcatgttatgtgaggtactccagctcctgcgacaagactcgcgtatttgtatccagtgatttcgtgtcttgtatcaagcagttcttccacttcggagtcccatcagcggcaatggtttggtaagtcgtttttaagtttcttgttggtcaagttacatacaacaaccaatgcttttttttatcttgcttgcgttttcttggtcttcctttaatagcctagaatggtggctatttgagctactcatactctgttcaggtcttctcccaaacccgaaactcgagacctctgttctttcaatttggtaaatatatatcatataacgacttctttttatttttattatcctctttactaaaaactaatgaatcttatttctttaatgcaagtcttacaacagcaagtttgcactatgtgattccaggtggagtcgcggcggctgtgaggtatgaactcaaatttttaaccaaacatattcaacatcttcttcctaaacaataatagtcatttggtttcttgcagcacacgcgtgtcaaacaaattgggagctgggattcctcaagttgctagggtttcagtattggcagggctttgtctctggcttgtagagtcagctttctttagcacacttctcttcacatgccgaaacattataggctacgcattcagcaacagcaaagaagttgtggactatgtggctaacctaactcctttgctctgcctctcctttatcctcgacggtttcacagcagttctgaatggggttgcaaggggaagtggttggcaacacattggagctttgaacaacgtggtagcttattatcttgtaggagctcctgttggagtatacttagctttcaatcgtgagttgaacggaaaaggactttggtgtggtgttgtggtcggatccgctgtgcaagccataatattggcttttgtcacagcttccataaattggaaggaacaggtaaaacacttagaatagaagattcgtcattttagcatgttatacttgtacattcttttttgttctttctttaatactatgaagtaattttaatctatgatttgcaggctgagaaggctaggaagagaatggtctctagtgaaaatagattggcttaaactaaggatgtttctgagagctatctcaaactatttttgtaggtgttgagcaaatttttatgtatggtatattaatgtgttaaaaaatgttcttacaaaataatttatatgtatgattttttctcagcctatctttttcactatgttgtgtaacttgtaagtgtataatcatcatttatccataaacatgcttttcttaattttttcacatgtcattcccaataaatttattttatggtatttgtgactataaccacaatcttctaccaataaatcttagtgaaccctttccgagagagcttttaggctcataatacaatactattcagattttgaaactcggaccttcacgacaaatctctgacgaaactttggattctacttgagagcggctgtcacttttagtttcaaccacaaatgatttactaaaacctgtgtaaaatcagatccaaatgtctttaaagtggtctaaagaatcaaaacttaaggtaagcaaattacttaaattagagtcaaactttaggactatataaaaatataaaaatccacaaaagtaattaatacaagattgaatgttcaaactctacaaaacaaaataattcatattagtcttcagtcttcacatatgttcttatgtaaataattaaaaagtattaacactaatgacatgtcatttttaatatgtatattctatatatctatttttataatatagtatattcgtgtgccactagtatctatattttcaaacaagtcaaaacgaatttgcttctttactcatcatatctacttcgtcaccacgtttgtagttcaagttgcctttgttgtttattgacttagtcggtctataaagataggataaatatcatcttaaaatcaaagggaaaggccttcaacgttaaacaatggaggagccatttcttctgagagacgagcttctagtcccttctcaagtcacatggcatacaaatccattaaccgtcgagctaaagagagtgagccgcttggccgctcctatggccactgtgaccattgctcagtacttattgcctgtcatctcggtcatggtcgctggccacaacggcgagctccagctctccggtgtcgctcttgcaaactccttcacaaacgtcaccggttttagcattatggtaattatgctatgactctaaccttttcaactcaagaatcaaatggactctctcaagtattgaaaacacttcaattatttttgtgcagtgtggattagtgggtgcacttgaaactctttgtggccaagcttatggagccaaacaatatgaaaaaatcggaacttacgcatactctgctattgcttccaacataccaatttgtttcctcatatcaattctctggctttacatcgaaaagatcttgatttctctcggacaagaccctgaaatttcaagaatcgctggctcctacgccttttggcttataccggctttatttggccaagcgattgtcataccactgtcccggtttctgctaacacaagggttggttattcctctgctcttcactgccgtgaccacccttttgttccacgttttggtttgttggactttggttttcttgtttggtctgggatgtaatggacctgccatggctacaagtgtgtctttctggttttacgctgtgatactctcatgttatgtgagattctccagctcttgcgagaagactcgcggatttgtatcccgagattttgtgtcttctatcaagcagttcttccaatacggaatcccatcagctgcaatgatttggtaagtcattttaagttgtttgtccgtcaagttacataccctaatgctcttcttcttatcccgcttgcattttctcggtcttctttaatagtctagaatggtggctatttgagatactcatactctgctcaggtcttctccctaacccgaaactcgagacctctgttctttcaatttggtaagtaccatagaaggacttctttttatcttttgtggtctctttactaaaaactaatgaatcctgtttccttcttttcagtcttacaatagaaactttgcactatgtgatttcagctggagtcgccgcggctgtgaggtatgaatatgatctcagttttatcattcagaacatcttcatcttattatagacaattctttcctaaacatttagtgattggtttcttgcagcacacgtgtatcaaacaatttgggagctgggaatcctcaagttgctagggtttcagtattagcagggctttgtctctggatagtagagtcagctttctttagcatacttctattcacctgcaggaacatcataggatacgcattcagcaacagcaaagaagttttggactatgtagctgacctaactcctttgctctgcctctcctttatcctcgacggcttcacagcagttctaaatggagttgctaggggaagtggttggcaacacattggagcttggaacaatactgtttcttattatcttgtaggagctcctgttggaatttacttagctttcagtcgtgagttgaacggaaaaggactgtggtgcggtgttgtggttggatctactgtgcaagccactatactggctattgtcacagcttccataaattggaaggaacaggtaaatagccatttcagctttttacacttgtaaattcttttatgttcattcattaatgctatgaagtaatctatgattttgcaggctgagaaggcaaggaagagaattgtctcaactgaaaacagattggcttaaacaaatgatgtttctcatagttatctcaaactatttgtatgccttatgcaaattttttttgaaagatgtttataaaagagggtcatttgttttcttaatcaattttatgacaaggatttataagttttcttcaattttggtatacaaatgtaataattacaagtgaacaaaaacctcattggttccaaacggggatgatcccttgtgcagcaagacgcttctcgacccaaaacacaacgtggttcgcagttggtttcctctcgtcgacaagaaatggttccacggtgctcggacctgacccgtgtgaggaaattgaaaatccttttgctcctgttttaagcaacaaaccaaaagacataatgttccattgaaattttctgtaacaagagtctcaagtaaaagattcaatacttcacctgtaaggtttccagtagggaaaaaggcccaaaaggaatatggaatacttttctttaagaaaaaaccttccaactgacacaaataatgataattgtcttagaagtttaatcaagaagacattttgagaacatccaataaaactggagccatatagggtagagagatggccccataagcatggcaacaaagcattagaagttagaagcaagaaaccttatcgtcttggaaagataaatctatgtcagagatatcatcttgagattcaagaatggcttgtaaaggaggaatcacgtcttcttccatcatttgtctcagcggtttcgccactgcagccgctttagctgcgggtttaggtttctttgccggaaccgccactgttgactcttctccttcttctttgtttttcttttcagtagcaactaggaagagaacaagaaagttactcttctcgaatttttgagccaaacattctgttttatgcatcaatctttaccagcagaagttgaagactcttgcaaggcacaccgcaaaaggttgtcctttctagtacctgattgctgcaagaagacgaatcataaagattcaattcaaatgagatacaaactccatgaaaattgaagacattacaaaccaatgttagtggtggaagcaaagaagaggaagagagagttggtgttgttatagagatacgagagcttgggactccaaatgatcctcctgctattgttgccataattaggaagaaacagaaactgtaattgagcttcttcaacgattacaagattcgttgttctcaaaattctcagtttttctccattttttgcctcaaactcaagactaatgttttttagtggaccaaaagcaaaggaaaaaagaagaggaaataaaacaagagacaaatgtgaaaaaggctgagcctaagatttgccaaccacacacacaaaaaagagatatagcatatttttatacctacaaataaaattaaaaacacttgcacttcccattatagttatgtttactatcgtatgtaaactttagtaataatatgtttacgttgatcttcccattgtagaagcacaagaatagaagaaagaaagagttaagtgtcgttagcttaattggtaaagactctaggcaaaactaatattacggatttcggcccagaaccaaaaaaaaaaaatatatatatagaagaaggaaaaaaaattgtcaatagattagaagcatggactaaattgacatttcataaactatcagataaaatgaataatattttgtaaattcagattagtactccgcaaataaatttgattgagaacttctaacgtgcccgactggagtaaaataagattccaaatgacactggagttttagccaaatttcaatcacgtggcgaaatcttgttcgttcttaaactgccagttagagatgcaaaaagaatcaaagtttagggagtaaactgtaaatacttccttttcaagtaagtatttgatgataatggctccctgattagaaatgtctcattattttagaccattatcactaagcagtaagcactataagtctataatcgcagaagatagataaaatggaagtagggttttctatgggtttgggaatcatgggaaagtccatgtcaatgaatatattgaagaacggattcaaagtcactgtatagaacagaacactctccaaggtataaaaaccaaaattttctgcttttgattgtgttaatagattacgttttgtctgataaagttggacactttgagtaatactaattatcttcaaactctcttggaaaactattgttgttgttcttgttagatttcagttcacaaacaagctgtcggagatcagaagcttcttctttgagtttagagttctccttcaatacacaattttgagtctccgatacgcggttcagcttatcgataagacagttgttctcgttgcgaagccttattacctgagaccagagttcatcaagatgtctctgtttcctcatccttgacctccttgcagattctctgttcgaaagcatccttctctgtttcctctcgtcgagtaccatgatgctttgatgatgatcttcgtcggaagttgagttgttgcttatcatgagatcttgactgttggatgatgaggaatagttgttgttgttgatgatcaaatcgtttaggtagtttaaggaagaggttggagatgaaggcatgtttattacgttgtattccggtgatagatattggaaatatccgttgatttctgccggaatcatggttttagtttggtttatatgagtatgtaagagtttctgtgtttttattttgtgtgaagaattgggaagttagttttgaagtaagaggaggaagtggaccaagggttttataatggggttgtaggagaatcatgtagaagtgggtcctatggattataagagcatagaataagaagaaaaaatgcgatgctataattcgtaatttatagtggtggaacatggacaaagaaatggaaagagtttagtcataacaaaaatattgttagtgttttatatataacttgttcattggaagtgagagcagaaactgcgagaaggtttttaaaattttggtttttttatataatttaaacccaataatagttaacttgagttgtttatttttgtaacctagatttatacacgtaaacccttttttattttaatttatggtaaattatattaaaaaaaaatatttatacaatgtttaatacgcagtaaaaaaaaatacaatgtttaatacaaaattttcatatcttttagtttaaatctatccttagcatttgtcttgtcgcaaccaagtttggatgcttcccttccctagaatgaacttatagagagagagagagagtgatgcggctaaactttaattaaaagattggatacgtttgagcgccaagttcgatccattatatgcatttaacttaaaagattcgacatgtctattgtttaaaatataactaactaaagtaattaagtactgacttgtccctcattcgttttcctttataagtgatcattaaataagaacccacactctacatcgtggagaaatatgtgtagaaattttagtttgttaatttatatcataaattataattataatatattttatttaataagtttattttgtaattttatatatttaatttattatatcatatttcaatgtaattttgcaatcgaattaataaatttgacaataattcatccaatgttaaaatcgttgatatctagagagtgagacatgttgatacgcagagaaattcatcaattcatagaaactaatcatagcaaatttagaggattaaccgaaaacatgatatattatgtttaattatgatattaataaaaatatttgtattaatgattaagaagtatttatgaatattaattatggttaaaaaacgtaatttgatgtttgttgcgttatcccattctacataggatctcgtttgtttcaatattttggaaaatataataatgaatttgaatatataaaagatatgatttttgtcatagtatttttcgttgtgagttttgttgcatttagtgtccaagtgagtcttttgaattttagaagtcttagtgtctttatgtgtattatgttattttttatgtcttttacactacaatggacattcttatcacgagaaaaatgctataatatgtctttaataactttttcatgaacgctattttagggcattgttattataggtacctcacatacagtagcgtgagttcagtatgctatgttatagtttaataacatagctataaagaacagttgtattatcacgtttaattttcttaaaaaaattatataatatttgatttttcgtgctatgttatatatctctaatatagctgttgcgaaatgttgttttatcgtggtttgccttttttcaattggaaaataattagtcaaattatgtgctatgttatgttcttatatcaatttataagctacgatagatgattaaaacatagcattagtcatatgttaaatattctattacctgtattcttatagcattttctgagatgtgattatagtacacataacacataacctgctttataaaatctcatacattgaccattgattaaacataagtttagatccaaaatacataagaaaagtctcaagcacaaaataaagcaatacaggagctaagtgcatatgttctctttccttgtgtggtaggatgcaaagcgtgtcgtagaccaagatgttgcagatccttacgtgcattaagaccatccttagattttccacaatgcaacaatgtggatacaatactgtgagccacgttcttttctgtatgcattacatccaaattatgccttactagtagatcctacaatatagacatacatatattttagaagtaattgatgtatcatacttaaacatataaaagctatttaaatctgaaaacaagtaatcatacctcccaataaggcaaagtaaagaagattgatcttttcttccatctagataactcatcctcatctacttctacttcctcatcttcctcggattcactggatacatcatcactatcatagactggttctttatagacagttctctttctcttcatcccagattttttcacatttccaaaatcattcttgaagtttttcagattttgataaacttcatgaccagttaaaattcttgtctttctcctatgttcaacttttccatcaaaccaagtcttcttttccctatatctgtgtgttggaaccaaaccttttctatgacacatatagacatgcttcctgctaaacttcaaccacatactatctgtattttttccacacaaaagagagcccatttttcccttaactttacatccagcaaggtttccatacgcaggaaaatcactaatagtccatagaagcattgcctttacagtaaaagtacttttactaaaagcatcatatgttagctctccatttttccacagataattcaaatccttaataacaggttctaagtagacatcgatattattacctggttgttgtggaccaggaatcaataatgtcaacattatattctcctttttcatacaaaggtgaggaggcaaattgtagtttaccaatagcacatgccagcaactataattactattcttcatgttaaatgggttaaatccatctgtagacaaccccagcctaatgttcctttcttcagctgcaaatgaaggatacttatcattcatcttatcccatgtaactaaatcaaccggatgacgaagttttccatccgtgctcttgttagtgaaatgccaccgtaagtccttggccatttcctctgatctaaacaatctcttcagcctttgtataattggaaaatatctcaatactttctgtgggacacctttttttacctcaccaatgtgctgattagtcttccaccgtgaagcattacatttgggacatttttcaagcttcttaaacttctttctaaagaggcaacaatcattaacacatgcgtggatcttttcatatcccatatgaaagctctttaaaaaattcttgacatcatacaatgatgtgtgaaggacattatcatctggcaacatgcttggcaatgtatgaagcagctcgttgaagctcttattcgactagccattatgtgtcttaatcctaaacaaagtcacaatagccgataacttgctgtggtttgaacagtttgggtatagtggggtttcagcgtccaatatctttgcaaggaactcatcttctcgttggtcttcacactctgcaatctcacttaagtcacccaccagattctcacctaagtcacctctacaagccaactcttcatcaaaaaattcagcagctttatataactcaaaaacttcctcattccactgatttagtttgctttgaactttatccactgacttctcatctccatgatgataccaatcactatgcaacttgtatgcctcatccatccctcttctaacaagatgatcaactacaacacagtcagactatcgtactacattacgacagtctttacaaggacatattatcatgtccatttctcctaacaccgcagcaacatcccgtacaaatttccaagcacctctttcatagccagtatcagctcttcaatggataagtaaagaaaaaaatagaaactctaagtatccaaaccccatatgaaacctaactataattataatttcttacttgtttagatgaacccatgccttgtccaacattatatgttataatataaatttaaacatttatagataaaacagagatacaaattatacaattttccaatcatactccacaataagcaacaattcagacaattccatgtaaatattcaaatcataagcaactttaaaagagtttttcatattagaaatcagtcaatagtgcaccaaatcaggcacatacagatgctcataaactaatctcacgataacttaagataattaagcaagtatactaatctcatcacataaacaacaacattaacaagctatatacgaatcagactcaaaggacagaacattgcaatcaactaatttggttgaatgatactaacctgttgtgtgagtacagagaaatgagaagcttcagttccccaacattgcaatcaccagcacttggaaaaaaaaaactcattcattataagtttacacatgaatcattacagattgaaacatgaatcgtttatgcaacaaatatgtaaccaaatcagtaccctaatttgtataagtttcacacattaatcgtttatgaaacaaatttgtcgaaatcacaatctaaatttgagtcgaaactattatcacacatagaggtcaaatcacaatcaaacaggtcgaaatcacaatcaaacaggtcgaaatcacagagatatgaaacagagaatgaaatcacagaggatagaaacatgccttcgatgagagttcaattgagttgagatggagatttagggcttctcacgaacagcgaaattgaggcttttcacgaacggcgataatgctggagatttgatagagatttcatttgtatacacagagaatttggaagaagaaattaggttttcacacgagagagagtattgaacttaggttttcacgagagagagagtatcgaacgttttttttttttttattgaaataataattcactaagtattggcggactaagtcacttttgtttcccactccataatttttctatcatagcgtttttaggtgttattataaagtaaccgaaaaaaatcacatcttttatatcaggtacggtaaatgagctattcttgtctgctattaatgtccatatttgttgtagtgttaatttctttcatattaaaataataaaatacacacttggatgcaaagaagataattgatgattcgaaccattccaaagtactaaaagatcgaacagatgaagatttttcattaggatttagctttagagcatctgataaaaattatagaaaattgagctagttttccagctacggtaatttaaaaccaatcagagtcgaatatcaacagttaacactgatttggtgaaaacatatcaatctgacgcgtagaagaaacacatccataaagtagtttagagtaatcgatctctaatttttcatattaattgaccaaatcttgaatgataaacaagaagtcttttcgtcaaaaagaagaacaaatcttttatgataaactttcccctttcctcaagaaaaaaaaggaaacaaaaaggaaagataactttccctaaatgcatccaattttttttttcttttcttttaaaaagcttataaaatatttaaatgtcttttgtttggtcatcctacttatatgtatgcatgtaatactctagatttcggatataatattattttatgtggaacgggaaacataaaaaattagtgattaaactaataaaaattaacgtacatgtctttggaaattatatgtttggtaaattcttcgatgtaagtcatacaacatgttcgacttcatttttggttgaaggacaatcttttgtaagaaactatttttagctcacttaagaaagattaaccaaaaaaagaaaaaaaaatctgtccaaaaaaaagaaaagtaaaaaacaatttagaggtgatatgtatgacaatttcgacaaatgttcttgttttgaggtatcaaatttaccgtcgaatgaagatagttataaggtagagatctgatctatagaaagaggcttattacaagatttgtttttaaaaatgtgagaccatcaatgacacttagattcttatcgaatgtgggtgacacaacatatgtcaaatctattattcttttggtacaaatcttaaaaatattagcaaatctaagtaaaatagtaatgttgatcctttctgttttactaattagatttttggttttttcttccttcactctcaaatacattcattcatatatatacaaacaaactatacgaatgtatttcgacgcctgtgaattggagtttagtggctaatttgataattaaaagcgcttgaaagttatttttgaaagacatgactaaaagattggcgcacttgcattgactctagaagtcttttaaataattaattttaaaattcatcactttttttttttttggtgtgtaaattttaaattcatcactaagtgattagaatccagccatttagaacatttgatgtgtttctttctttgttgcatcaacaattatataggatctcgacatattgtttatctatactacatatatttaattcgaaaatcgcaagacattcacaacacaaaaaattaatttctttaactttataaaaattgacatctctccttgaatatatacaagtattattttgagtaaagctcaaagtttataactattaaaaagatataattgatatgatgtaagaaattaatgtaaatagaatatatatatatatatatatatatatactagaaaagttatcgcgtggattatatattcggttttagttttgaatataaaatgatatttatattaaattatatataaaacttatttataattgttaatatatcgctcataattaatttaaaatattaattttgatatttacaaattatgatgtgtttaaaaaagatactttagttgattaaaagttatttactcaattttcttttattgttttgtgaaaactgtatgttttactatttaaaaaaacttaaaatattcagtatttgtttgtgtaaatattctctttgagaacttaaaacaacaaaaataaataaatatttgatattagatatccatataatgcataataaaattagggttttaaagttaaactataatattattgagttgtttccttaaatttgatttgtatatattgtaaaagaacaagagcaaataaaaattttgtcaccttgaaggttttttttactggattttccttcaaaagttatattaaattaattaatacgcaacatacataattatacatttgatacatgattttgaattatataaattaatttctttttactatggttatttgctttcaacagtttaagattactgttagatttgttttattatcttttattagatatttccatgaatacattacacatgagtttcaatatgtgttaaatagaaataaatattcatatttttcattatagtaaatgacatgtcaaacaattgttgttattagaactccaaacagataagccaatgaaataaaattccaattgtttttgttttattattaagcataaatatagttttatttatttgtaacttcaaatgatggaaaatatgtctctaagttaaatgttataagcttttataaattaaaacaataatgtttttatataattaatttaagattatgtaataattgttattatttcaactccaaaaaaataagccaataaaataaaaaattctcaaattttctgtttagttatttagcatttttaaattcaaataatgataaaagtatgatccaaaatatgtctgttagataaatattataagttgttacatcttgaaacctgaatttattatgcaagtaaatttttatgattatttttatatttgttttatttattttcatgatattgatacgtgtaaatcaaattaactaatgataacaaacacataagtcattttataaacattatatatatataaatatcataagtctgtaaattatttatatgtgatgtgatgacaaaaataatagctatactttatgttacttttaaaaaatgaaactaaaaacttaggaatcatatatataaaagtaaggtttcactctttccttattggtccacttggcaatataagtttataaaaaattctaaataaattctaaataacatatttaactcacaatttaatataaaactgaaatcataaaaatatgtgttaattacatttttacactctactttatttaacacacaataaattaaaaattaactcccacaatatatttacaaaactgaaatcattaaaatatataaattaattatatttctccacaccactttattcaacacacaacaaattaaaaattaactcccacattttattttcaaattgtaacttccatcacttctcatcctagatatatatacattctctaatatcctcatccccttccacaatatctcaaatctcaaatattgtttagtttagttttaagttttttattttgttgttgttattgttatgagtttaaaaaatatcattgtaaaagcttagttctaaattttaattttagattatgaaccttacattcttttgttttaaaatacatatcgattatctaatttcattaccatcttataaataatcattctctcatcattttccactatattcatgtatatatatcatatgttgttatatgggtaaaacacaataaatttaaaagatagaagttgtccttggggtttaaataaaaaaaatgttatattaaaattcgtatgattttataagaaaacaaatttagtttgtcacttacaaaataaaatgaattggaaatattatgtataagtttatatcaacaaattattttgtaatttactttgtcatacatttattttgtaaaaataagatatgatatagttattaatatatacatgcataaataacatagaaaaataaaaaactgttaaaagatgagcaaatgtaagatatcaaattttaacagaatttttaatttttacaatcatataatactgaaacataattattttaattaattctggtataaaaaattaaagatggaaatctatatatacatttttgcagccattttagcaaataaatcctcaacttggacttatttacaatctaatgcaattagcattaaatcttttttccaaaataattcattttactttaaatttttgatttaaattgtcaatcacattatcaatcaaatttaatcccaccaaacttcaaatcaatcccttaaaattagcataaatatatttgttaacaatattttaaaacaaagttttttcttaaataaatattattcttactaaacgttttttgtttaaataaataaattttgtatttgaacttatttacaatgtcgtgtcattgacattaattatttattaatgaaaatatttaattaaagatttaaatcttctaaatccttacttttagagttattatgtcattaccttataaacaaaaatattttttttaaaaatattattatttatatatttaaaatttataaaacattattaatatttaaacttataataactttgatatattacaattttttaacatcattatataatatatagagtttaaaaaaatcttaattttttccgtcatattttatgattcaaaattttaaaaatgaacatatattaaccaattagcaaaaactgtgtgggttcaacgtctcgcatcgacaaaaatatttagacaatgatttataaacatatcataaataagatcaacattaatataaataaatagtttttttacgggacgggtttggcgggatgggtttggcaggacgttacttaataacaattgtaaactataaaataaaaatatattatagatagatacaatttgcaaaaaaaaaattatactaactttaaaaagataaattgtcaccgcggtgtaccgcgggataaaatctagttgtttttgtaaaattggagaattattttagtagtgaagtattactgtgcagtctaaaacataatatcatgtcaaatttttaaagatttgattttataattagttgagggagtattgtagtttaatatattgtaattttcatagtttaatgactatttttctaaatatataataaatctattaataaattattttagtcaaactacaattaatgacaagtacacgtgtcatcaaagtataatgccaaatgtcgcattgacagacaaaattagaaaaaaaacttctcttattatataagatatatatgagatatattcttagaaatttaccgatgaaaagaatcgtaaaaggttatgccataaaatcaatgagtcttcgtgcagattcattggataagtcttgtagcaagaaattctaactgcactacaaattagagtgtgtatggaacaatttgatattttgatgcatgacccaatgtctccactttcctcactttataacagttccacatattcattatctctattagtcattgtatactaaagatttgtgatcctagctctattaattaatggttggtaaaaaaaaacattcttttatgctattggtttcattctgttgagttaattcaaaatcattttatattctttgccactatagtattaagcaaccaaattcaggtagtgatccactcacgctttgccttccgacattaattaatcacttgtgaaacctatcttattagattacgtaagccattttcttatccctactgtgtttattgtgtacacgtatcgaccgaccgaataaatcttcacatttaaaatataggaatatgtctttctggatttatattagctgaaacatggattagattatttatttgtaggatttaaatgttaattaataaaatgaaaggtaaagataagacgaacatttttcaatcctaagtatctcggtttgctttctcctatttggtaaccataagagttgcaataataccattaaaggccttgtacttctgtttttcatatttatgtataaaaccaacgtatttaatcttatcaccaattgaatttagcttgtggtttgtgtttgtggatgtgatcgacactgcgagaaaataaagttaatcactgcgataatctaataactgctaaattttgtaagtgtttgtttagtatttaaatataaaagttttgctatttttcctatacatcaatgactttggcattacaaattttgcctctgaaattgatgagccgagattgatctgcctctgaaatttaagtaattagaggaaaacgagagtgttgattagatgttcatatgtgtgaaccactaatggaagcttactcgatatcaatctatacaatcctcctccaatgaatccgagggatttaattggacatgttttgatgaaagaaagctaaaccctaaggggataatgtatatagaacccaaggattccaatcatagatattgatcaaatcagttaagaatttcaattgatttgatctcaaaaggaaaaaaaaatcatagtgagttttggcttctttctctttcgtttttgttttctacgtttgatattgagatttggcatgatgtgtatattagagaaaagactttgaatctataatcctatagatcgtcgtataagcaaagagtagtcgtcgtcttcaaaccgtgatgagtatttgaaaaattgtagcttcaatgttgaatgaatatggtgagggcaaaatagaacagaacaggtgacataaataccttaatcaggaagtgctttgagaaatgctgtattcaacaatgggacacactttaaactactaatcccataattgatcttatatatcatagtatgtttacatcgacaaatgtcacttttggacatcacgaacatatgtaaaaatggcatgaaaaactttatttaacatgtaacaaattaatagtagttgtccaaaagaaaaaacatttaacaatatataatacgtcatcaagacccttttgtctatatacgtcaagatgcagattatttcggaccattgctataaaacttaaaccacaaattcagaaaattattaataattaatttaacgattaaatcaagaaaacaagaaggattagcatttcatctttagaattaaggagagacacacgaaaccataataaaataaacaaaatgtggtgttatataataatcaaagaaatatatcattggcacttttgaaatggcgtcagcaaatgtgaacttcaaggtgtaggatccttcattttttcataagggatttgaggttaattgatgtcaatcaatttttttataaacatcgttttttttaatatgtaattcattggtctagcaaatatatacagagattaaatattgtggcaaaatcttgtctcccataaagcaaaatacaaagaaacactaaaccaatttggtcatgcacaaaccaaaccagagcaaaaactgagatcgtctactcctcccgtgggtgctacggcgaaccatcgctgagtaggtgtcggagatggggcgagatataaacatctttttgaatttatataccatgaaaaaataatattaattttaccaaaaaaaaaaaataatattaaccattaaacttactctattaatattattattagaaaactataccactttatttttacttaacagtcacaatatattaaatggaaataaagttggtacaatttttttcactaaaaactctgtttaagaaaatgaataatttgtaagttattatacaatttagtaactatttgaatgaacatgtatgttgatgtgatatctgaatactataatagatttttgtgaaagaaatttgatttgctagatttttttactcatctgatcgaagaaacaaaattttgaatgataaaatcatctgtcaaatactggtttcccactaacagggaaatttgatagaatatagatctctataaaggaataatcattttttgatcgataaaatcatcggtccactttatagttaaaaaaaatatatcgaaaaagaaagttgagctaatttttgtttctttttcacattttttttcttgattatccattaatattagtttttttgaaccactaaatatgaaaatcaatttccacttggacgaaaataaaccatctctagaaaatattatgccttggtgaatcatacctccccacttttagatgagcacaaacattgtcatattgtgtgcacaaaatctcgaatcaaactatataaagaaataactttataacgttgatttcttttttttttggacaaaacttaaattcaaataaccactaaaccgggcccggtataatcgttttaagggaacacttagcaatctcatcagcttcgcgattgtgtttccgagagatgaaagaaaaactagattgcagaaaaatagaagataaactcaggatatcgtgtagaatcccgtggagtttcaatggaggatcccccgaattgattgcgtcgatcaactgcttggaatcggacgctgtgatatatataactctagaaaagctaaagaaaagcagttctttataatgttcttcgacatgtgatatatataactctagacaaatattgtttaatcaatcaaagacgtatgtggctggtcctttctaattatgtggttataaatttccttaggccggtaagaatccatctcggccacaaaaagaatttggatatatgcttagttttaacatatagatttatttatagtttcctttaaagtaaattaaaccgattctcattccccaaagtcacgtctctctgttatactaacagtaatgattccgcattagtatgttataagtaccatcaagacaaaagtatgtcttttttgttttctttgggtgcaaaaagacaaaagtatgtatttagttaattaaaaggataaacaattaaacgggaataaacaccttatatatatattaaaagatgaaggaaaacaaaaatatgtttgaaattttactgcatatcatgattgaaatagtttcagggaacgacattaaaaggataatttattcaatttttttttacttacaatactttgaataacaatgaattaaaacgaccaatattagtaaaattttatgattatttctacctaattaatcttaaagaaaataccgtgtaaattgtagtttcaatataaatttgattacattttcttgggctgaattgtttcattaatttggtgcatgtatgtagattgagtattctgcctcctgaagttcaagaaagaaatcgcaatacgaatgcgcaaattgttaagatcacataaaaataaaacatgatctaatactaaagatttcattttttcatatatttaggtttttctaacaatttttggttagttgaaaaacgcctactattgttatgaactacacagttattatccttctaatcataataatatgagcaatactctttttcaaaatattattattatcattgagaaaatcttccgaatatagtaaaaccaagtatgcatgcaaattacagacggattataatcattcatcaacttgcacgtcttagcataatttattgtctagtcaaatttcgcttgatgagtcgatgaaatggtacatgtgtattgtctccatacacatagaggtgtctcgctcgagcagtgaagatatttgcaatctttgtttgttttgcaaggaggaaaattcgagcgtcccctgtcagaatactcaccatcattgcacctaatgacgcatatcagaaaaaaaaaaaccaatatgtcatgttcaaactgaaccgaacccaaaccaatttgctagaatacccgatttgtttttgacttccctacccaaacagaccccaaacccgaaaaagactccaaatccaaaaaataataataattaatagtctcttagaaatttaggaatttaatttgcatatcttacagtcaaaaatttaaatattttaagagaaattggcattaaatatcttagaatgtagtcaaaatgtaaatacgtttagtcaatagtagtaacttttaataccataatatatatatggcatcttactatatgatataaatttatcaaatagaatgtagtcaaaatgtaaatacgtttagcaattatatatcaaatggaatactgtagctaggagtacgatatactgcatgaagacaacgatctacaggggatcgtgggaagggctgcctcgctagggttgtgaaggtttggcaacctcagcttgggtctgtccagtttggggtctaccattgtttattttatcctgaaataatttttgtttaaaaaataataatatgtaattcacaatttatcatgatttttaatctattatctatgtatcatgcaaaatagcacctaaaaatatgaaggtgaaataagtcattcatgaaatgttttaaacaatattaacgataatggccgttttggcagtccatatagacgaactagaatgtcaaaaatgattccataaactattttttctgtgttgacccaaaaataaaaactactagtctttatctttctaaacatcaacataaacacaaactctattgaaacgttttctaaatagattttattatcatccttgaaaaaaccttcctacgatgataaaagcaataaataagcatttgtttataataatatactgtactacgtacaagtacaaaaaccattcaaacatatataagatcccgagacacaagaatatctcatacgtggatcacaatcactcgtgtacttgcatgtcttagcatcattcattgtccttaagttatcgagttttgcttgatgtgtcaatgtagtggtgcatttgcattgtccatttatacatagaggtggccttcccaagcagggaaggtttacacagtcatatgttgttttgcaaggaagaacaagctcagcagtcgcagttggaatacataccatcattgtacctaatgaagaacaccggaccaggaaaaggtatgttttgttcaaactttatatacaataagcatgcttaagtaataggcttgttagagagattagagagacttacaaacgacgacgagagcaagcacgaaaaagattgtgatctttgaagccatttcttaattatggctagaacttatggagacctctgctatttatagtctctttgaaatactataatttaattttaatgttttttcgttgactcaaaattttgatgacttttgccataaaaacaaaacgtgtattctacaaaatgtaaatattttggttggtttggtcaaaattttcaagatccttttttcactggttgatatttataccatatttattatatctatttataatgccatatcaatttatcatggttttagagagatataccataatttaagaattccaataatcctccgttaagttttattctccagaaagatgtagaaactacatatatattgtatagttctttttgtattttctattagtttgtaaactttattcatatatagttaaaacaagaagcttggaacctatataataatgacaatctaaataaatatcttttcattgcaactgtttgtagttatctttacttattttcagtttgaataaatgttttatatagttacattttttcgtcctaactttttgttaaatttttaattttaatattgataattagaagaatattattttgtttttaatttaaacaaatgctttatgtgattgcatcttttcatggcacgtgccattaattggtacacgtacataggccatcaaaacacatataagaaccggagacacatgtaaatctcatacgaggatcacaatcttttgtccacttgcacttcttcgcatagtccatcttctttaagttgtcgagttttgtttgatgagttgatgaacgactacaatggcattgtctgtttacacatagaactgtcccgcttgagcagtgatggtattcacaatcattcgttataacgcaaggaagaaagttatgagcttctgctgttggcatactcaacatcatcgcaccttatgaacacatgaccaaaaaattatataataatgttatgtttaaacttcgaatcaaataagtatgcttgagtcatgttatagagactatagagacttacaattgataacgacaacaacgaggaagacgaatgtgatttttgatgccattttgtaattatgtttgaagtttattatcaaaggtagtgaaaactcataggctttttatatttatggtttctttgaactttatgatttttattgcgatctttttatttaatgacttcaaatctttagtgacatttttggcatataataagaaaaattctatatataacagatatcagtcataaatagaatgtagtagatttcagaaaaattaacaattaataatcaacaatcaacaagcatgattctcttctttaatgattttatttgtagaatcattgaatcctggaataataattagagaaacaaatataagcatgatgctcttttttattgaatcattgaaatcatgcttttaccgatatataccataatcatcgatcgactcatagtgttttgttttaataaaaaaataaatactatgaaccatgagtcgttaagtaaacatggttctaaaaaaagtaagaatattatttacccttaaagcgtgttgataacgtgttataactagagaaagagatagaagaaaatgagtgtattattccattgaataaagagtcctatatataggagtacaagggaaggattttacttggtaacaagtaaaaccctagatacaagtaatttcctagatacaagtaattccctagatacaagtaattctatagacatttaaatgatgggccttataatgggcatccatctattattcataacagttttgtcaacacagcttattccaaagttcttcatagtcttggatctaaaactgctccaatagccaaaataagactgtaatcttcccaatatttatatcaaactaaatgttcatttccatagccattagctctatatcatcatcactaaaagcaacatactttttcagtattaattcaatcctccatacttgggtgaaatatacatttgacgtgagatatttagagcctgaaaagtaagtagtaattacactaaatggcttcaacaagtcacatatcttttcaccacgatcccactcctcatctaatagtaaagacttataatttatgtcgaaacccttcatgctattaaatgctttttctaaactttaatgctctaacaagcatttcataagttgaattcaatctagtacaaaaatcaagagataactctgccccagttcttatcctcacttctctacacatgctgcaatggcttctttcctttgagaagatgcttttacatatagaacactttctcgaatgttatgtaaaacatccttagctaactttaaacctttcttcacaatgatgttaagaatatgatcacaacctctaatgcgcataaatttcccatcacaaaacaaattactgccactaatcatttgaagctgaccattgaggattttctgcatattattattattaatagcattgtcgagagtgatagaaaacacttcttctagtcctcattccttcaacaatcaagaaccctattagcaacatgttcacgggtgtgcggggactttaactcacaaagtctagaatataactatgtaaatgccaactatcatcaatgaatgggcagttacacagatataactcatcatactaggccgagctgaccacaagtctgaagaaaaacaaactctaccatgatgttttgtgaaaacctcatttaactttttcttttctattccatatctcacaaaaacatcaacaacaacagtttgccttcatatacactgataatcgcgattcaaatatttgtctctctctaactttctcatattctacatatcgaaaaggtaaatcgtgatagatagttatttgactaaccatctctcgatcaatcttatgatcatataccggcctctctatcttcttaggcatcttaggacacctacttaaatggcgacttaagtgatttgttccataattttcatgtggtttactactagtacctatcaccaactttacaccacaatggatgcacttagctctttatttatcattatttcctaatcctattgaaataaaatcgtcccacacagttgaagttttgcctctctttcgtggaacttgagtttgagttggctgaatttgtttttcactttgctccggtgcttgcacttctgcgtcttcctcgttcatatctattaagtcattttgtgcattgagaagtgccattaattgtatagactctaaatccattctggaaaacagaacaaacacattaacttcagtatgataatcagttttatgaatcatcaacaaaagaaactatgaggttgaagactatacatgagtgactaagtaattgcacaccaaaacacaaaatttcaatatatatatttcagttcataaaggtgtttcctttatagtttatacagagaatgtggaatagttatggaaccgtacttatcaagtagaaataagggtctactttaacaattattaatagcagcatgactaattgatttaggataaatgtttttcaatgcacttgatttcaaagcaaaattaaaatcaaaataactagttatcatttaatttagaattctgcgaagcattattcacaaaacacaccaacatatcttcatcaaaagtccactaacatattttcatcaaaaggattagaatttagaatttcagaatcagaaaaaaccttaaattattttcttgtttacttgttcaatcaatcgaaaatacctatgaagatgcagtctatggaacaaatatgaggaaaataatggttaataagaaatacctatgaaatgggattggatatggagattgatgatgagatttcttctatctcctccaagttagagacttgagaatctgtgaaagagaagaaaaagaacagctctcggtcagagataatcaaaaccagaaaaccctagaggagaagagaaaaacccaccactgaaatttgtcgaggttcaaaaaattcaagaggatgttggcttgagatcggaaagaacgtcggaactcattttcaattcttctatttggcaaaaaaatgggtattcaattattttgagaaaaccccatttaattattgggtctagttgggctcctccatttaaactcatttagggggtgttattggttcctaatttacaaggaatttggatgacttcaatcacatcctagaaagtattgttagagggtttttttctgatcttgttgattagtttttcataatcttataaagtttctcaaacaatctctctattttgataatacgtttcatgactttccatgactttattttgtgaagaaaatgtagaaagtcatgaaccaataacataataattgaaatcattaacaatcagagattcttttgttttaattgaataacacaaaacttttaatgactttataagagtatgaatccaataacccaaaatttatgaagattttagattacatcttataaatcttaaataaataacacaaaactttaacataattttaacaaatcttgattgaataacaacagattctacatgagattttaaatcactaaaactcttttgaaatcataaaccaataactctttagtatattttgataaatgggtctacatggactgcttttttaaaaacagacccatataattaaatgagctattaaacccatataaacatcaatagatacaagtcaaagttaaaagtatattgcccattctatttcggatttaaagtgtccactatcatcctcattataaccaaacaaaatcaatccatccttacgttgcatggaaaaattatttgatgtccgtttcacgtatctttcccatttcagaaattgttcgaaaatgcaaatacttggaaacgctttagaatcgcgtttcttaaaaaactcaatttggaaacgtgatggaaacggacgtttctattttggaaacacaagagtacattttggaaaagtattggagactttttaatatataaaaaaaaatagaaaagttatatcatttcaaaatataagtagatatatgatacttttataattttaaaaccctaattaatatgagggatacgaaacacgcacaattatttattaagtcacctttgtggatttatgtgaataagttggagaagcttgcatgaggaggattatgaaggttctaaagttttttaagattaaattttctggttcttatagcagagtgtgaggtcatttgttaacagatgggactaagggaattaaagaacgcttgaaggtcacctcccaacaaagagataacataaaaaaatgtcacctcccatgggcccacccctatctgacggtcagtgcgctacgtctggcaggctttcaagacttgttaccgaccctacaaatcaccacatgatctttccctatgctttgtctgcactcgcatagttccgacaatcacttcccggaaggtcacccatcctgaaactactccagctcaagcacgcttaactgtagagttctctcaggacttttgaccaaaaagataagtgcaatttggtgacatacctggcaaattcaattcttttaaatctcttcgcatgcaccaccatattcatgaattcggggtgtaacaattcacccagggtaatagatcgcaacgtcctcgttgcgcaccaagactgtcaccccctataaggtgagccttcttgactccacactcgtatgggttgggctctgataccatttgtaacgccctgaccgcccttaccagtgggccccacgtcctctcttaggcccatgggcccacccctatctaacagtcggtgtgccatgtctaggaggctttaaagacttgttaccgatcttaaaaatcaccaaatgatctttccccatgctttgtcctcactcgcatggttttgacgatcactttcttgaaggtcacccatcctgaaactacttcagttcaagcacgcttaactgtgcagttctcttaggacctttgaccgaaaagataagtgcactttggtgacataggtggccaaatcaattcttttaaacctctcccagatgtggcgtactgaccatcagatagaggtgggcccagagaacgtgggggtccactggtaggggcggtcgaggcgttacatgcgagcatcaaacattctaggatatgttcccccttaatataatgcattgaagactgggcttcttcaaaaagaatgaaaaatcatcgaaatgcacttgcaacatttgaagaactcatggaaacaaaaagatgttaggcaatgtagtgatggttggtcagatccacactgaaggccgatatttaatttcattgttacaaatgagagtggttcaatgatgttaagggcaattaatagatggcgaaattaaaactggagagatgattgcgaaattgaacatagattgcataaaagaggttggatatgaaaggaagctatagacgaatttaatatcttcataaaaaatgaattgagctcttcataagaggaaatttttgggaatgatctctcaataaaggagaaattttgcgagaatgatatctgcgtaaagagaaaaaatgggatcaatctctccataaaagagaaaaattgtgaaattgtaccccatgcgtggatgagacggacatcaattgagccacacaccggtaaagacaaccctccataacgaagagaaagctagcactcgtggaataaactggagtaagctgagggtggaagatagagatggcggttctattagcggttttaggctgatcaaagaaagagttacacgccaaccaatctttaaactagaaaggaattatgtaataataagtccaaggtgacatgtttataggctaagcccatttataaaaaaaacctattgttatcaccatgaaaggatcatagttcacaggtacactgctcgttctattttggattgaaagcgtccatgatcatcctcattatgaacaatcaaaatatttccaatcttaatatatttgtattgttttatttctaatctgtcattttgacttgtaatatattgaagaaaaaagaaagtgttttgtcttcaagtttgcctaaaatctaatacgttcgatccaaaataaggttaaaagttactagtacatttttatgtcttttatgtaaacgtattctaaacagaactattaaatgttgaggtttatgatgttagtaacataaaactattattgaataaatgttttatcaattaaacatccttacccattgccctataacatctcttgttttctcgtttcatgtcactaatcttacatccaaaaccaaaagcaaatatggcaaagtcttttctcatggtaatgctcgcatccatggtaatgttttacatggcttgtccaatttactcccagaaaaatatatcagaagatatagacatagctccaacttcagtggaaggggctgatttacccacaacagagtatgagatagagcttgctcaccgtttacatgaagattatattctggcttgccctaaaaagccgagttccaaatgtgatgatgagattttcaataacatgatggatgggacgacaccagtgacaagtgaatgttgtcgtgatatattgaagactggtaaagattgtcatcttgcattggttaaaattgtattctccacggatgggtataaaagtaaagcatccagagcaattccaaaaagtaaacagacatggaatgattgtgtccgtagagttgggatggagattggtgccccggtcacttttgaagcataaaccaataatattccctcataaagatatgtttatgtgtttttttaatttgattgtgaccattataaaacagcttccattttattttttctaatcaagaaaatagagccagtcaatattttacgttttcgttttatcattcgaatgagtctaacaaaaattgaagaggcatatgaaaagtgataactttcaaatacaacatgcctcacaaggttgtagaaaatgttaggaattcaaaataaaaattctacctaatctgatatgaaatttaagttatatatacactttatacactacaagaaaaatgttaattcattgtatacaaagcttaaaaataggtgtttaatagcatttttgtaaacactattatctccatcgattaacctatacaatagaatatttgttacatgcaatcatacgtcgtgtaattataaagctaatcaaatgctttcatatattcatatattttcttttaacacatgtttaatgatgttgctattttgtaatttttttcgttgaataaatatatctaatttgatttttatcactatgtatatatatatatatatatatatatatatatctatatatatatatatatatataaccacgttttgtagaatatatttacttgaaaatatatatatttatatatataattttatatttcacaaatcatcaatattacataagagtaatattacattcaccaaaaaagtgttacataaactttttcaaaacttgtccatcatcattgttttggttaggaatacttgatttcttttgtgtagatttcttattttcacacttaatcacctagtgttgaactaaaaggctaaaaaaattcaaataaactacttagactattaaatttgagcaggaaaccacattaactttaacatagttagtcaaccatttctttttgtggactcatacaacttgttgacgacaatgtgtgattttgttttaatctcgttttggtaatttgtatccataaactcaacatcgtgaccaattagtgatcaataaacgttcgtacgactgaaacagaaatagagcttataacaaatctttccaaaacagaggctattattgaagtcactatcatcataaagaagagaaattttgaattgatctctttataaaagagaacgtatttagggatgatctctccataaaggagaacttttacaagaatgacctctccttgaggaatttttttatttgggattgatttctccataaaggagaaatttttttaattggtactccataaggatgggtagcgtctgaaccgaatcacttgtaaagacgaccctccatgatgaagcaaaaacttgcatttgtggaacaaattggagtaggctaaggcctagagggctaacagtggaatatatagatggaaattctattagcggtttaggatggatcaaagaaagatttacatagtccaactaatcaataaactcgagacgaaaaaaggtaacgataagcccaaagtaaaatcgaaaacacctactgttatcaccatgtaaggctcatagatattcgcaagtataaagcccgtttcattttggatttaaacgttcataatcatcttcattaaaacaaatagaatcatttaaacctttttttttaattgttttatctttaatctatcactttaatttgtaatagtttgaagaaaaagaaagtgtttttgttgtcaagtttcgcaaaaatctaatatgttcgatccaagaaaatgttaaaagttacatttgaaaatcttataagtttcttctgttaatgtattcttaacaaaactataaaatgctgagatttatgatgtaagtaacgtaatactattaatgaataaacgttttatcaaccaaataaactcattgattgccttataacatctcttcttttcttgtttcatatcaccaatcttacatctaaaactaaaagtaaatatggcaaagtctattctcatggcaatacttgtatctatattaacgtttagcatggtttgtctaatttgctcccagaaaattcatcattattcaaaagaaatatcagaagatgtagacatatctccaacttcagtagaaggggctgactcacccacaacagaatatgagataaagcttgctcaccgtttacatgaagattatattctggcttgtcctaaaaagccgagttccaaatgtgatgatgagattttccagaacatgttggatggtacgacaccagtaacaaacgaatgttgtcttgatatactgaagactggcaaagactgtcatcttgcattggttaaaattatattctccacggatgattataaaaatattgcatctagagctattccaaaaagtaaacaaacatggaatgattgtgctcgtagagtgagcaaagagattggtgctccgatctctttcgaacagtaaaccaataatgttctctcatgctgatgtgtctatgcctttttctaatttgattgtaaccattataaaacgtctaccattttatttttgataatcaagaaaatagagtcatgcactattttatgtttttattcatcattcgaataagtttaacaaaaactaattaaaaaggcatatgaaataactttcaaatacaacattgtctcgcatgggtggttaaaatgtttggaattccaaatacaattttgatctaatatgatataaaatctaagttatatatggacgctatacactaaatgaaaaatgcaaattgattatacacaagacctttaaaatagatgtttaatggcgcttttagaaaaacaatgttacccgcatctataatagggtcaccctatagagataaaattttcttgatatgctaatatacgtcgttcaattatactgctaatcaaattcttttcatatattttcttgtaacacattatttaaaatatagaatattatattataacttatttttgctgaataaatctattcaaaatactttttgtagaatttgcttaattgaatttatatataatattttttatttcacaaatcatagatattacagaacaataatattacattcagtaaaacaagtcttacataaaaacaagttcaagagagaggaagtgttttgatgttacttgtaatttcttatgtcttttatgtaaacatattctaaacaaaactattaaatgttgaggtttatgatatcagtaacataaaactattaatgaataaatgttttatcaattaattaccattatcgattgtcctataacatctcttcttttcttgtttcatgtcaccaatcttacatctaaaactaaaaacaaatatggcaaagtctttttccatggtaatgcttgtatctataataatattttacatggctcgtccaatttactctcggaataaaatattagaagatatagacatatctccaactccagtggaaggaactgattcacccacaacagaatatgagatagagcttgctcaccgcttacatgaagattatattctggcttgccctaaaaagccgagttccaaatgcgatgatgagattttcaataacatgttggatgggacgacgccagtgacaaatgaatgttgtcatgatatattgaagactggcaaagattgtcaccttgcattggttaaaatcatattctccacgaatgattataaaaaaattgcatctaaggctattccaaaaagtaaacagacatggaatgattgtgtccgtagagttgggatggagattggtgctccggtctctttcgaaccttaaaccaatacaataatattccctcatgcagatatgtttatgcgtttttttaatttgattgtgatcattataaaacatcatgcattttgtttttggtaatcaagaaaacagactcatgtaatattttatgttttcattcatcattcgaatgactctaacaaaaattgaagaaacatatgaaaaatgatgactttcaaatacaatatggtctcgtagtgatggataaaatgtttgaaattcaaaatacaattttgagataatctgatataaaatttaatttatatgtgtattttatccattataagaaaagtgcaaattgatcgtacacaaaaagttataatagatttttagggtcaattgataaattaacctaaaagcactatcatgtcgttgtagtacttaaggatgtcaatccaatctggcatgatgcaaacaaataagatatgatcaaaattcactaagtcaagccaagcagaaatttgttggtttctaacaatcctagtgtgaaatattaaaaatgaaatgaaactgaaatgtgaaatggcaataacacgaagactaataagtgagcaggtaaataacaggcaatcaaatggataaaagattccaaagaatggggtaatctgttattcagacagttaacaaaacttcatagaagttatccctagacaacaagttcaataacagattaattcactaccgtgatagaacccctcaagcatagctagtcacatacctaatcaccattagcgatctctagttttctccttgatttcttaccaatcatttcattcatgaatgcttgattgaagctgtttggtggagcatgagttttgtggacgagttgaaaggttactcaatgtaaccccccaccccacccccctcccgatcatattagacaattgtgttttaacattatgagttgaacccattagggcccattactataatacgacaagggtttttgtcgtgtgttgtgtgtctatataaaatggtgtatctatctccttcttagtgtgccgtcaaagagaaaaatgaatcaaaaccccttgagaagagcagcactaaaatcattgagagtggagaagctatagttgtgctagtgctgttgatgtcattcgttcattaaaagaaagagatcgtgagccactgtttcgttgttgtcatggtgataggtcatccgtggagatatgactgagagagctgaaccaccatctacatatacatttttgcagccattttgtgaaataaattctggagttggaacttatttacaatggctgccacaggcttattcaatgcgaaaattaactaccaaatcaaagcaaatcttattcaaaggaatatgctattattccatggcctaattatttttgccaaaatagttaaaatatttaaaaattaaataatcatttgaaagaaaactttaaattgatttaaattataaatcttttaataaaaatattattaaaaaaataaaaatttattttaccgaataggattagatagtaggactagatggtaggacgtgtttataatattataatatataaactttacaacaattaaataaccattcaaaataaaacttttaaattgatttgaattaaatattttttaaattaaagtattattaaaacaaaaataacaaaataatgtctaattttaccgaacgggtgtagtggtaggacgggtttggtcgatagtattacaagacaagtgaaatccattagatatgtttaatttcactgtgcaggattagatggtatgacgggtttggatcgataataatacgaaacgatatactacgggtgaaatcctagatataacaattaaaatctatatatacattatcttaaacattaaacaaaacaaacaatattaataaagcaaatatctacatatacattttatataacaaattttattaaaaatctagccccgcagtataccgcgggtcaaaatctagttggataatagaacttgatctaattaagaggacacgttatgactggagaagaatagaaggatgggaagagatcggttgtgacgaagaaaatggaagcggtgatggaggagacgtcacagatcttaacttttcaccaccaaaacaaatggcgacggagacgagaccgttcaacgatgatggcaaaccagtgatgagtatattttgtagcagatcatagatggtgatgttgtgatcagtcgaaggaaagaaaaagaacaaagaagaagagaaaggaggaaaaggaagaacagtttcaagaatgtttcttacaggctaaattcccgacagaccagaaggactcagataaggactaaggtgtcactggaaagaacacgctgtcaagaatccacagcaactgacggatcttcaataagacttaaaatcaagaagttatgcacgtttctttctggacaaatatttgcaaagtctgtcaaatccagaaaaccccaaaaaacagttcgagatggcttgttgacgacagcgtttggagcttatatagaagtcagatcatatagtaaattggtggagttattcatgatactatcggctacataatcaacggtcggatcacgtttctaacggttagttcctgacttataagtatgttactgtgacggttttgtatggagtaaccatgacgagttttattgtttggttgggcaaacaagataggtttgagcctaagctttgcaggagtcttcaagactcagtgttttagttcttggttgatggagagccaagatggtgttcaatagtatgagcttggaagcaagctagtaacttgtctaaaggagaaaggagaagagagttgttcttcatcttcaactaggctaatgtgagggtggtatttgcggatatgcaatgaattatttccttatatactctttgatagttgctgagtataggctcgagaattttccttgttaatttatttgaatttgtgtgaagataggttgttagtaacatgatatttgaaatgcattggtgacatgatttgatatatttattatatattaaattacagaaattattatgtatatgagattataaaactaaaaagaatggaaaagatatttaaggatgttggactgtaattgggccgacggtccattacaggtcattaaccgctaacgagcaatgagaggaaagatcgagttacgggccgttttcttccagaaaataggcttgagtagccaagattaataagcttgagtagccaaagttaatataggcttgtgaagccataaagtaaaatactaaaactgaaaatgaaagtaaaatatattgttgtgagcaagagcgcatgtttgtttgtttgattgttagacattctgaatctatgctaagtaatggtcgttaattatatttggaacatttttactgtatgtccaatggacagacttgatctcctcactgagtaaaattgttttactcacccctttttccctttttctccaggttagtaagtctcaaaaattgcggttaaagtttgttcgttggtgaattttaaataaagaaaaggtttggcaagaccgaatgaataacacgctatcttggcctgtttggggggacgggtgttatactcaagttaacggtcgagcatagtggtcgagtatgagttgacttttcctcgttcgatgccataacctctgtgtttggtctaaagaactatgttcttgctactgccatgtgtgagtccaatgacttatcatagcttaaggtctcactagggagatacctagcttcacccttcttggtcaaagcaatttgaaggtgatcttcttcaacaagctcttctagtagttcatcagctagtcgatccgtttgtgtataatcttcttttcgatgattgcactacactcatgacttaacacctccattccttgaccttctttgatcctctctgtaatcatatcctttatgtatttgtgggaatcttgtattagcgcataataatccactagaggcattgtggcttcaagatctttcatttgttaatctaagagaggctcttacttctttatcagttgcttattgaatcttccttgaaattgtagtgaaggcttgtagggtggaggaacaaagactttatccttggttttagcagcgacatgctttttaatataaggaggtattgcctgagtaggggatcgggtactacgatctagtgatataagtcaacttacccttaaaccacactctcaaataagagatcgtcgatagtactcaagagtcgaattccacaaaattcttttgttcacacaataagctaagtatcaagaataagctagaagagtataagaaaaataaaaagaaagtaaagtaagaaaatagtaagttggttggttgttattcaagataatgaaacgtcaggtttagggtattcttaggaaaaaatgattagtagatctagatatagttaggttgttatcgaaccgttattaaactcaaactctaatattataataaccgatgatgttccgtgaaactcattatgcctagaaccaagattcccggtgatatgccgtgaaatcatgtacctaaacatgcatgctaaagagttcaataagttcaccttagtagataggccgatttttattacacatctataaaccaggtttatcaaatagcagttctggtaatagatatctatggtgggtatatctattatctggaatcaagttctagttaattactctagaactagcattaagaacaactaaagaagaagaatcctacatataacctagcgggggtaatctactaaatcatatgactccctagtgagaaaccctaaccttaacaagcagactactcaaacatgatggatgaaacaaacatgtatgaataaggaagcataaacaaatcaatagagaaaagagttagaaaagatctcttcactgttattgaaatctctaatgaaactctgaaaacaggggtgaatagcttatgaaagtgctcaagaaaataacttggttgctaggaaacttgataaaaagcttggtaggtctaaacaatgacctttaagactatatatatgacctaaaaacgtgtagagactactaatgaaaataggggagtcttttggggcaaatttccaatacttcaaacttaaaagcgtcatggacttttctaggccgcaactggtgtcgatcgacactcaattggatttgaaagtgaattcatccaaaatgtcttctcatcttcattgttgcccctctccatagaataacttaatagactctaaaaagaatctggaaataacaaaaagactcaaaaaccaatatctaaaacatagttaaaaacagtaaaaatagggttatatcatctagtatgggctcctctattgctatttcagctgtaacttcattctgaacgaaatcctccccatcttgatttacactgtcccaatgattgacgtaaggacatgtcgagttggcagctctcgatcatgtctaatagtgatagcatgagcagtggcatactcctttgggttctggattgctttccctgtaagctggcctaggttgctggaaacggatgttgtaacggggttgccttccaggtgtcatcctagtgtttagtgattcgaacttgctggtaagatcattgaagttgtggtcgactttgttgtttaattatgccatcttctttgcgatttctattgctcatgtggcttgtccttgaatgatctgctgagcatgttcttcatgtctgaatcctgaggcgaaggtgcttgatgttgatgtggtgggaaacaaggtgtttactgttgttgttgatatcctccctgaaactgcttctttggaacgatatcaacagcaaaatctaattaatttatattattcttataatggcggagaattataatttatggtggtaatggaggttattatcgggagtggatgtataagaggtttgacgaagtgacggagaatctaacagcagaatacgtcgcaagagtggaggaattcatgacgcatgctaatacccagtcaatagtacagagtaatcggggtaaatctcattgtccttgtagtgtgtgcaaaaatgaaaaacatatcgtttcgggtagaagagttggtagtcatttgtttagtcaatgatttatgcatgattattatgtttggtataaacatggaagataggagttatctaagtgatcaaaataatgaatatatgggtaatgttgtagaagatgcatctgttgatatggtgaatgatgcatttcgttataacgtggggtctgatgataactataatgaggaaggtagttatcagaatgtggaagaaccgatacgtaaccattcaaagaaattctacaacttgttagaaggtgcaaaaaatccattatacgatggttgtcgtgaagaccagtcatagttatcgttggcggctcgagtcatgcaacgactaacttatcaccatttgtcatagtcggcaattagtcgccatttaacgactacattagcgactactcattttagcgactattgatttacaactactcacactagtcgccaaagagtcgtaaaatccaaaataacgactacaaagcgactatagcggtagtcgttatcaggctgttttcttgtagttgtacaattttcactttgaaaacatcaaatactatatgccacacagatttaaaacaatgaatttacattaaactacaaaatatcatcagtctttaaaaatataaatattaaatcatattttcatagaagaaaagttaattaattttaatgatatataactcaactaaataaggattcttaaaaattagtacaatcgcataatccatcgaaacaacaaggtcctgttttttcgcagcggatacgcttctcacaatcttcaataaagttacaagaccaattgatacatgaatattttcctccttctccaggacaccataggccatcacaatgttctctaaatccacacaatggaagatcgctacgagacttattttttgatgcattggtttcaagcaacatgaatgtgcctacatggtgtacaaatagattatttaacaatcactttaaatgtgttccagaactagtgatgttatagatgtgtataatagatatataaagataaaaaacttacaagagatgagaaagaagaagatgaaaagtgatgttgctctagacgccattgatagattagaagatggaaagatagatatgtatttttaaattttatactttcaaggaatgatgtatgttactatatagttgtttggttgttcaaatgtttctagaggtctttaaaatatttccgttgtatgattgtttaaacagttaatgtgtggtaaccaattaatataagatttttttggtcaacactaccttctaaatatttagcagaaaatggaaataatcaagcaaagttggcgatcccactttctctaacggatctgaaccattgatctaagatttctttcctttttgtttttgcatatgaaatcaaaattgaaaacttaccaagcatatggatataaacatacatgtacatatatattggatggatatatttaatttatggtaaatattgtttttcctattatatttatgaaagaatttgaatatggttgacccaaaaaacaaaatttgaatatggtgattgttgttgagttgtttcgaaaagaatatatattaaaggtaaaagtaccgcaataatttttaataaccattactatttataaaacaaattgaaagtttcatatacataaatccaaaattattaaacaaaaagataaaaactgtcacccaaaggcataaaataattttcagttttctaagtctctaaccatttaaggattgacattgtgaatctttacaaataattttttcaagaacacaagtgagcttatccttacaatatcttgttgttgtgcaaagtaatgggggtttcagctagttttagattaagactttttctgttttaatgtaatgaaatcagtaaactctgacattataagtctatagattttactgatgcgaccatacaataaacaccttggcaatcatcttaggtcgagcagttatgatattgtacttgggacttagctctaggtatactcacttatctcatgcctaatatcgagacattgatatcattagtaatttgaaaccaaattgatttttattaaattttatatggaaataattattcgagagatgagatagacttacgtgtaagaatcactgattgaaatcgctttatatgtcattttcttggtaagggtataagttgacacttcaagaagacacataggtgaccactaaaacacaataagaatacaaaaacaaaacacaattgtagaactactttaatgatcaattatcatagatgcaaagttttccatgcgataaaataaaacacaattgcagaattacttttttcctagaattacaccaagttctactcatatatgctatattatgtagaaaaagtccatcttacacacaaataagacataatggattccaacctcataagatagaatcactggaaaatctttacctagcactgcttaaatcttccaccatcttttctttgtcaagttttgcaggatgagtggatgaactgatacaatggcattttttcccttagagattttctgcttgcacaattggcggcatatcattgcattcttctctaggggcaaacattcaagcagactgagctattgtggttggtgtacctaacatccatacatctaacgaaacatatcagtcctaactaagatatatgctatgtagaaatccaacaaatatttacttaaaccttgaaagacttgtgagacattatcaagagcaaaacgaggaagagagattattggttgtggtatcattttttatgacttgattataaataatatcagaataagtctccataacctttgtaatatatagtatttatttgaaatttttgaatttgtttttaatattattttgaagttaatcacttttaatttttagattattacattaaaaagaaatatatctgatatcaagtactatacttgacataacaaatattacaaagaaaacttttccaaagcattgtcaaataaaatatccacacttcattgtatttcttcgttttaaagttttgtattttcattaatttatctatttcaaaaaaatatttaaaatcaaaaataaaagaaacaatcttaatcatattttcatacaagaaaagataaatttaatgatacattactcaactaaatatgtgttattaaagggtaattaatacaaacaaatctttagcaagaattcatgaattagttttctttaattaatattttagaaaaacaattgattaattatttctcattttcttgttgaatttagttagacattcatatattttgaggtttatttttttctctttgtatattttgaaaatacaaaaattgatttggcattatacttaaatatgtggttactttaagaattctcaaaatattaatataattttacatattacagaattttaactggttatcctaacattttgatgtttttataaatatttggcttaccccttgcattagaacacatgaacaaacacactatactaccgtattaataaaaggtgaatgcatgatatcataagacttggttatcaaaaatagattacctttataagccaaatgttttcatacatatctaaacctttataaaacttttctaaattcatatctttcaccttaaggaaaatctgctaacatagcagtcaacatggtttcagtccaaatagtgcttattattgcgattatattcatatctcgactataaggcttgggaaatggatcaaacattgtcagattgtgtacctgtcacagagaatttacgaagaagaggtataaattgtgatacaggatgtgtcagatgtggcgctattacggagacaataaaccatacccttttccaatgtcatccggcgagacagatatgggctctctcaaagattcctacggttccaggaatttttcctacggattctatttttacgaatttggatcttctcaagaataccttcaaaagttgattcatcttcatttccaaggataatctggtatatatggaaagcaaggaacgaaaaaatatttgaaaatgtggataaagatccgttagacgtattatatttagcagaaaagaggcacaatcatggcagtaagctcaattagagctcaataccgaagataacggttccatgggatcggaaaaacaaatttgggttcagaatatatcacacgataatctattctggttttcgttgttttgtggacggatcttggaaaggaagcgataagttttctggattagggtggttttgcacatcatcaaatggagactcgccaaccatgggagctgctaatctttgtagaagtctttctccactccacacagaattcgaagctttactatgggcgatgaagtgtataattggtgccgacaaccaagaagtagcattttttacagactgttcagacctggtgaagatggtgtcttccccaaccgaatggccagcgttttcaatttatttggaggaattcaagaccgataaggaagaattcacaagattttctttatctttaatttctcaaactgcatatgtaaatgcggacaaattggcacataaaatttgtactgaaccgcttcatatcacttatgtaaacaattttcctcagaattggctcttttgagctctaaataaaatctgatgacaaaacaaaaaggcttgggaaatggattacccaataaaatattctatttcattaattaatgcattataagaaaacaaagcactttttttaacaagtgcaaaatccttccatacaataaggacctggagagtctttgcaacgaacaagtttcggacaatcttcctgaatgtcacaagtcatactgatacatgaatactttcctccttttctaggacaccataagccaccacaagaattgtctgatccgcacaacggaatatagctactaggcttatttcttgatgcatcggtttcaagcaacatgaaagtacctacatgatgtacaaatgatttatttaaccatcacatttaaacatcttttagaattagtgttgttttagatgcgtataatagagatataaagataaaaacttacaagaaatgagaaagaagaaaatgaaaagtgatcttgctcttgacgtcactgatagattagaatattaaaaggtaaataagtattctcaaattttgtgtgtttgagaaatgatttcagtgattaaatagctgtttgattgttcaaatacttattgtggtctttgcaatatttccatttttaatttggttgttcaaaagtttttcgttgttttgtcattgcttattaggtaaccaattaatattagatttttttggtcaacactaccttctaaatacttcgtagaaaaatggaaataatcatgcaaagttggcaccgccaatttctctagcggatctgaaccattgatataagattttttctcttattattttcagtttaaatataaattgaaaacttctaaagcatatagatatacatagatgtacatatatattggatggtagatatttattttttcattaaaatatagactatattttattaatggattttctgactttttaatgaaataatttgaatatgttgactattaaaaagctttttttaatatggtgacgattattgagtttgttttacaagaaattttagatttatttatataaaagtaattctttagaaaataaaaagaattttaaaattattagtattcaagattaaatttaaagtaatagatattatggatagtatttgagattcataaattttacttcatatataataaatatatcttcaaaaattaattacttgtcaattttagtttaaaatcaaatcacaatatttgtctgaagatgaaattttgttttaaacgcaattctataccttagaaaagttatttcaaaaatattaatttatagtataatattcatttactggtttaagtaaatttataattgctacaatatttttaatttttaataattatttttttgttgatatatttggttttcttgtttctcaccaaattggtaagcaatacttttgttgtataatcctccatatagaaaagaatgacgagaaattttgtggaatctatatgtattaaatatactacgtacttctttgaaaactaaagaaaaacaatgtttatcttctttttctgtttgatggttatcattcaaagctaatatatcggtaatgagggcatatcatatttattatattgttgaccaatgttaagtgaaagtatatcttcaaattttaatttgtttataaacgtgtgatatccatgcctcgagacttgtagagcctttgaaattttatcattatatggtttgttgaaactgaaaattactctattaattaaaaattgttgaagatttgaatattaattagtagaaaaggatttatatctaattatgccataattagtagtaaatgtatatcactaccagattcaatttcggttaggtgaccatgacttcaaagctgtgatgccgattgtaatcaatggttgatcgaatcattgaaattcttctctataatcatcaaatttctctctttctcggttaaacttagaatcaagcgaaatttcgatttcgtatcttaagaatatcgactgcattgtgttagtcgattgagacttcaactaaacccttgtttcgaccagttgatggtaagaactaacaacatcacaggcacaaaattaaagaaagacagtttaaaatccttttgaaatatgataatttaacttttaagcttcagaaaagtaaaattttggaaaattttatattcagttttccttttaaaagttattttgtatttttcttgttccaataaatatgtaaaaattcaaacttcattccacaaataaaagcaattgtgcaaaacaaaatagtacaagattttattgtaccaatgatcgaaaatcaaagtgaaggacagaagtaaagatgagtctaactcaagagttctatgcccacttagccatcaaagacattcctgcggcacctgtgaaggtagcaacataaccgaggacatgaagtttaatattcccttgtatctttggtccgaagaattcatgagccaagagattaacaagggccatataaatcaacaatcctgcagagcacgcattcaagacccccacaacgatcaacgcagttggacttgtctcatcatatatcttttgtatggccatccctaaaacaatcccaaatggtgttgtgaccgaaaagaaaaacaccattgtccaatttgttttgcttttaaattgcgcctataataaataaaaaatatatttatatgttatagacatgttgttaatttaactatcaaattaatacgtatatagtctgaatttacttgtaagatggaaccaccgagtcccattccttcaaagagttgatggaaacaaagcgctgcgatgagtgattgtacggtacatttgttatcagaagcccccatagcaagaccgatcacaaccgagtgaactacgatacctagttccaatatctgcaccaaaatgatcgtttaaaaatattcattggactagattaaaaatagatctctagcttcaactacaaaacaagaattaagaaatgatattaaaaatatatatatacagttataaattcacctgagcaatgactttattcctaagaagttcacttgtcttatcttcgttgaccttttcttgtttctccacataactagatccattttctagggtttggatgtcgttttgtgtatccacagaattagatccattttctaacggtacgacttctccttcacgcttactagttctcctcgcatacgcacacatcgcaaacgattcaatcattaaaacgagcaaagccgagatcatcgtgatgaaagtggcgaaaggaaacttctgccacgggtcttcaggcaaacatttggatgtgagatcatcgaaagagtccggtaacacatgcataaaaccggttgccagaattacacccgaagctaaagtcttaacgatcacagacatttctcgatcgggtcctaaagcaggaatggaacgagaaaacaacggtaaagaaacaccgatcatgctcgccactaagatagatgggattgcaatgattttaagcttttgtgcttctttgttgttgtgacatgatagatctccagattcagctttgcattcacttacatctgcgttttcagcgttaccggcaagagagggtaatgtgaaggatagaagaagaattgtaatggtggtgagtttataacatgctttagaataagccattggagaaagtgaaaagaaagctttcttaactgtttatttttgcgatgaagactataggagaaaataatttcgtctcaaatttataaagattgtaacacaaaaaatgaaacttaaggttgtggacaacatatgttgtcttatattgtctccatccgtacatacttttcctaacacgatgcttagatcaaagtgactttttggtgacgtcacgatgatgtggacgcagtggaagtgccacgttgaaatattaaaaagtgtgagattttaattttggtgaaaactttgatataaaaagaattcagaatttgtttcctccaaatagatatacagtatgtatcttgcagactttcacaaaacttatttcctaacaaaaaggagaaaattgatttagattttctccaatatatattaataaaatattttaaatactggatacattacttttaaatatttattatttcttttcaaaatgaataagaattcttacaaaatgaccattaaaacaatgtatatatgtttaactcacaaaagaaaaaagaaaaactaatgtatggacatgcttcaaaaaaatatctctgtattttttctatatatttgtttttggttaattccctcgcatttcctgcctaattgtgacataactagttgattagagttaaagaaaaacaattaaacaaacattgaaatcacacccaaatcaatagaaattgaaatcacacccaaatcaatagaaaataatccaacccaactaaaagtctaaaaccacataacaaaccaaataaattaaaatttaaccggcctaaccctgacatcagatgtttcttgaataataatcaacccctatattagggtttgaacaaacctcattctattgaaatcgaatctctaattctcttcgtcgaaccatgggcgaagaagatctctctgagatcaaagatttcaccagtaagatctttctccatctcttacctgaaattgtttgttgatcgatctgtcaatagtaatgattaacggttaatggatcactaacccatgcccgcccagagctaaagatggtgaagctaagcctttaggcatcagattttattaacaaaatttggggcatcaaattttaaaattgttggtggtatagtggtcaacagtactaataatctttttctatgtgtctagttcgagtcaaacttttgtcaaaaattgttttttttttcaacaccccattgttaatgggccaaacacatttttgctttaagcaacaaaaacacttgggccggccctgcactaacctatgcagaacctatcacacccgtggaaggggctaagatggacatcttttgggacctctgggttacttaacccattccctgatagagtgatagtaacagtcctgatttgatctatcagaaaatcgaatcctctcttattgagatcggctttagcggtaagatgtcaatttgggctcatgttaacgataagaaagtttccacatggggtaagttttatgtaacaagacgtggaaggcaagaatatacttccttcccgaggcaaaaatcccgctatgagaatgttcaatgacattcttatatggacaatggactctggtgtggactttactgcgccagcatttattgatatgtcaagaagatgagacagttgtcttctcgaacttggaggattatccaatccttagaactagaagtgccaatcttgattccatttatcttaatatcgaatcagctctccataaaatggtaccacaatagagatgacttgtcccgggccagaatccaatataccatcctgaaggtgaatccctcttaactaacaagactcttctcgtttctacttatatatgt

SEQ ID NO: 164 - DNA, 46626 bp, Arabidopsis thaliana
tctgaccaaaccaattctccaaacacatagcccttagccacatttcccttacttttcacaaggatcactttaaacgtcttttgctctccaactttggtgaaattcaagctcgttggcttcaccgcgacataaacaccctgtgggttattcaccttgacggtatacatcgaaggtcgtccaacgtttttaacagtccttgaaacggtgactttgcttgatgttaagtttggaactgtgatggaaggatagttgaggttaacaagactgattttagggcttgaacaagtaaagttgttgcccgagaatacagagatttgtgatgcattgtatccaagtgagcataagaagttgaggtaatccttgatgcctaaatcgtatacgagaccgggattcacagctaaatttggttggacgtgtcctgccccaaaactgaaaggtgttgccttcatgttggttgcattttggataggtccaggaatgtcatccattattgttgctgaaagggaaacacaaagtgtgaaaaaactgtaagattcaagaaaactcattccaatatttccaacctaaaactaagaaaacagaacatggccatggaagaaacaagatttggttataagtccaggaccagtagatgttaatgtgttttaagtggtaaaatagaattaaacttcaattttgtcaacaatgtgtaagctctagaatcgaaatacattcttaccggtagtcatgatggcagagcggatagctgcggggctccaagaaggataacgagttttgagaagacccgcaatgccagagatatgaggacaagacatagaggttcctgaaatagcattgaacagaagtcgtcgaggatcaaactgttcgtttgttggagagactgctccagtgtaggcagcgatcacactcacaccaggagcagttatgtcaggcttcagaatctgaggagccactatgcttggaccttttgaagaaaatgaagccattacaggcgctggttttagtcccaaatctgtccttgaaggagtaatgtgtgcaatcggcttcctacatcaaaaaataaagttttctttcagaacttgaaacaagtttaggtaaagtgtgaatcaagaatcctacttggtttggctgatatatcttgacacagcaaaactatccttagaagtgagctgtgtggctggaaggacatgcgggtcagcgagtaaatcattcccggtgacataagtgttctcaagaaccatccctatgccaccccctaaagccacggcccgacccttttccaccctcccgttctgccctctgagacacactaatatctttccctttgtctttatagggtcaagcgatccaagtttgcataattgtctacaacaaagagagagattcaaaattaacaattaacataaaacatttggcgtaattaagtaaggagattagccaaactcacgcatccaaagctgaagcgttcttagcttttgcatttacagatgccataattggatagaacttagcatgtggcaatgccgtggatgacaagctttgtccctacgaatgaaaaagattcaagctcaatttcaagaattcattttcaagatttgagatagagatatgatccatattcttggacttaatatctaaccttgtaatgttttccattaccgagaacaagattgctagcaaactcacggtccatggtgctagcaccaacggtaatctgccatggcgcgacattagaaaccgtactatctgccggtccagagtttccggcagagcaaacaaccacgatccgcttcttagcggcgtgaaaggaaccaatagcgacactgtcgttaaaaaacgaggtaggctcgccgcctagagagacggatatgacgtcagctccgtcgtgtatggcagcgtcgaaagcagcgaggacgtctgcgtcgtagcattcgttgcctttgactggcggccagcagactttgtacgcggccactctggcgcgaggggagccacctttggccgtgccgttgccttggccgaagatgctgactccaggaacaaaatctccggcggcggtggagagagtgtgggagccatggccgtcgagatcacgtggagagtcgaagcttgagttgagatgtcctacggcggctgcgtagcccttgttgaagtaccttgctcctatcagtttccttcattcacgtgtgttagcttaacaagttagtgtaaaactgtaaattattaaaccaaacaaaaaaagagtttaggctacatgcaaattagtacaagttttactttaaaaacgtttttacaagttttactttaaaaatgtttttataagttttcactatagcaattagcaactagctagtaataagtgtttttagtttacaaagtattttacagggttctatcataaataaaagaaggataatattactaaatagccaaaaaaacacaacgtaaaatagcagagagaaaggtttttgttgcaaattagtcatgaactcacattatcaaacgaggtgaaatgacaaaacaatccttcgtttgttgcaagttcaacagtaggcgagacacttgtgtgaggttttacaaaatagcatgtaacatttaaatttcacatgttatatttaactaaaagacatgatatttaaaaaaatatatcgtgttattttaagaaaaatcattgttacatagtggttttttaagaaaaaacattgttatgaaaaacaaatctgtatgaagtctttttctaaagaattcacatgtgattttaacagaaaccgtgtaatattacaaaataagaattttcaaaataaaataaaattcatgtgatattaactaaaaaacgtatattactacaaagtaacatgataacaagaaatattaaactgaatataatatatttttccagaaatctcatgtgctttttataaatgacatgcaatacaaacaaaaatacgataaaagagatatattatgctatcacatgtaattcgagagaaaaatatgttatgaaagacatttacgtaatttcacacactctccgacttgtttccgacaaagtactatagcatatggttattttcttaagtatcgataaaatttgactattttgtgcatattctcatagaagaatatattacagggtatcattttagtttttgccttgtaattacagggaatcataaatgaatatcttttttgtttctttttgagattccagttctatcttttgccaagaaaacagataaaaaaggttaaaaagaaagtccagaataaaaatgtgtaagataaaaaaaagattctacataagtaggtaaagtgggatacgaaacataaggtcagttgtatagataactatagtgtaagtgttaattatgtaaataatggaaaacaaaaacacatggaattgagtaatttttcattgaataatatgctatttatttaaatgatttacttaacaaaacatgctatttaatattgaaatttatgtttataaataatttagaatcaattattttctgactattttttaaaataagtgataatttatagatatgttttttaaagtatagttgtatagtccaatcactctaaaatttactacaacccatcaatagattatcaaaagttccaaaaaatgagtcatacttttctttttgtacctaaaacaaacccacggatgttgaaatagggaactcaaactcaaaatagatatgacttgttacaacacgtgtcttctttttgttgatgaaaaattgtaaattcgattctatttgaaacaaatacacataattccaccactaggtgtgtgaatgtgtcaactcctaagaaatgagaacagataattccagaatttgtttgtatcttatgataattacttaacgtgaaaatgattgaacaccaaatttgaaagaataaaaattgtaaaagagagaaaacgaacctattgcaatggaaagtggcatctttttggttttgacatattcccttccatcttgaaggaattggtcccaagccttcatctctaaagctctttgattctggccacacacctttttacacatacacaatcaaattttaaaatattagtttatgaaattataatcaacaacatattcttattaatacaaagatagtaagtgggtttaagttactaaaatctaaaaataaaaatacataatggtgtctcataatcagacaaccaaatgaaccaatcattttagttgtggcaacttctattgcttttctgaatcaatattatattattcaaaggaagggtatgaaaagttctagttctcaagtatatcccaactttatcatcctaagtcccaagattttatgagaaagaaaaagaaattcgaactaaaaacaccaataactattaacccaatacaaactttttctttttattaatcacttgacatcatctagctgaaaccgaagaattacgaaaatacattacaaaatctcgaattagattatcatgtttaaaagttggttcatcatcatctacaagaatggttaagatctgttacagcttcaagtataaagagcattgcaagagtttctttgattattgaggaaattttggaacttttagacccgtagtcttctttttcggccaggaccagcctgtgataaatacattcctaataaagaaggttcaaactagagtacattctgtatatagcacaatcttcactaaaggatactaagccactagactatccacttggtatttatacttttacgatttttttgaaaatttaagttattagtccataagtcataactcatgaatactaaattaatatagaatacacattactcatatctactactagtgaagttacctgcagtaaatgcattaaatttatgttaaaagaaaaatgcatggtgccaaaaacaccttaattgtacgatgaattattcaccaacttttctattccaaaaacaaaaattctgtaatttatatggaaggtgctttttgatatatttattatctcgataaatgtttatttaattcgttttcgtaactacttttgaaagaaaagtatttactacagaatttggtataaataatacaacttataaagatttagtgtttatgattcaagtcaaactatacgatgcagtcaacgtatagaatattaaagataagaaatgccataagtctatctagttaagagaagtgaatatgcatattaatgaatatgcatatgcgcacatgcttgcatatatatatggccgatttgattcttgctgacatctagagatcttaactactagctaatctaatctacacaacgaatatatatatttcttgtaatgcaagtttgggaaatatatagttttaaaagtaggtacgtatcttcccaaaaacccatctcaaggctctcaaagttgcaaaggttgaccaagaaataaagaaatataaattacaaagagagataaaaaaaaaaaaaaagatgagaaaacgaacctgtatcgagatttgcaataatggtatcttctccgaacctagcctttctccaaatggaagaggaaggaacgtaagagttatgttccaaacccaaaaagtcccatgatcgagtcgtgtgaagctttaaagctttgtttgggaagacagacacaacttcagggtgttcttgaggaataatcaagaaaagagaaaagagtcaaatcttgtgaagcacaaagagagaagaagataaaatggttatgtttgtatacttactggagatttcataagcaaggtcgtggtctagatgagcagcgaatccgttgatgtgctttgtgtatgagtagaaaatggcgtctgtggctctctcacggctggtttcacattatcaagacttaagtcagtgaaaatggtttcacatattaaataagtttttaatgagttgttttgtttaagagaaccttccagtgaaggaaccaagaaagtcgtagtgagtttctttgactcgatccatggcatcttctgttatctctccgacatgagagtgagctccgaagtacaccacatatgaagacgactgaaatcacacaaagagaaatggttgataaagaatgtgaaatgaaaaaaagattgttatagtgtaaatgggtaatgtaatgaatgtacatctttagaagcaagaatgtgtttcgagctcatgtgaacaagaagaagaagaagaagaaacgagaagttatgtgttagcttcattcttcttcttcttctctcttcttctttgtatctttgttggactttcactttttacttgtggcttgtgcgttgctcctttataatgggattgcaaaaaaaaagaatcggtttttatttccttttttattggtttcgaaaactattttggttgtaccgtgtgcgatcttttatgttaataaaatattgaaattacaatatcttttggggtagggtcgtttgagtctatattaatatcgattgacaaaaaaaaaaaatatattgaaatcttttcaagaacatgaaattttgattttgatataagttttttttttttttttgtgaaacacattatagactagtatgatatcactttctacgaaacaccaaaatacggttttttatgtgtaatgactaataaatacttgttattctcccagaatttatattgtatttttaataattgatttgacattaatttgttgctgaaaaaagggaagctcagtgtaataaggtggttttgaaataaaaatgataagatgctcaagtggtcacattgcgtcccaataatggagtttctattgatgctatatttggcagaaaaactgataatttatgacctgtttgttggtcctaatcttatcattgtcttctatatacttagagaggaaaaactatgtataaaatttttttttttttttttttttgtcaatcgatataaattagaacttcaaagagccgatataaaagaaaatattttttcgtcagaaaattgtattcaattgatacatcttctgagtagtataagaaaatagggaaatgtcacaacgatagatacgttaaaatagaggattacagcatcaagttacaaggaaaatttggaaaattagatgagtaaagatattagttgttctagggtaagtcattttcaaaatattgctaggcgataactcaaagtttgatagatatcaaagcgcgtaaaacgactagttggaacttaggttttataaacttattaaattagttttgatatgtttagtcatatgtattactaattatattccattcactttgaaaactaaaaaaactagcaatgtaattaattaatttgattttgagttagaagaaaatcaaaatttcatagagttcaaactgaaaattgtcaaaaataaacgacaagcttgaaggtcgaaaagatgatgaattaaatccaaaatcccaagtactacagtatacgtctcttaagcattagaaaatataaaattttaaatcagaaattaaccgatttgagagattttgtctgatttggaccggctagactgagtttccaatttttctcagcgatttgataaaaattgttttgcttgggaccttctagattttcaaacactgcaaaacattttttttttttttcaaacattgcaaaaaaacattactaactaaaatgttatttaagagttgaattgctatataaatataaatctaactaataccaaattacatattggtttcacattggtttttctgattttctttcctttttaacggttttacaaagctatttatattttgatgtgttttaagtttaaacttaagtttttctgattttgttttggtttaatattatttttaaatatataactattaatttagctagagtaaatttattttctgctaaaaatttacgatcaaatttaagtcaaatcctgaaaagaaaaagtattagctttgacaaaaaaaaggaaaaacgtattaagtatgactttgataaaagaaaaacgtatttaaataatggaagactaatagttgttcaaaaaaaaaaaagtaatggaagactaataagtagaaacgtcctaaatggcaaactatttaacataatattatatttgtctccgttaattcagcaaagtattagtttctacatatacatttttgcagccactttgtaaaataaatcttcaagttgagacttatttacagtggctgtcactgacatttaataattttttttgataattagaaagtaaatctttgaattaaatgtttgcatttaactactttctcaaaatctctttgcattaactatacgattagttactaaatagtacaaaattatcatttttgatattgcaaaatatttaatatgatttaaacactacaaaattatcatttttgatattgctttttttatgactataacaattcgattataagcagcaaaccgtagagatatttgatagcaattaattattacaaaattacaaaatatttagataatgattcataaacatatcataaataaaatcaacattattaaaataaagaagtttttttagaggacgggtttggcaggacgttacttaataagaattgtaaactataaaataaaattattttatagatagatataatttgcaaacttttatatatactaactttaagaaaataaattgtttccacggtatatcacgggttaaaatctagtttgacaagaaaattgagaaaagtattagtgttggtatactagtagtattatattgatagactaataatattagacaagtactacactaaaaaggttttttttttttttttttttttttagcaatcaaacatatttttctattgtaaaattgcttgaaaggaaaagatttattcagattggacataaaaaatacattttataaacttttatatgaaaagacacaaacataaaatatatttattctgattgttattattatacagattagataatatttaggtatatttatcttcatatttaataattcaaaaataatacatgtttgcaaattctcacctcagacaaatctcttaacacacatgtaatttaggttatgtgaatcaattcagctcaggtttatactatacgtataacatgtctaaacatcccgatgatcaagcatgtagcatgatgacaggtttatgtcgaactatgggttcgaggtcgatgactgagtagagttgaaccataggttcgagggttacgataacatatgatatggttcaaattgtctaaaaaacactattttaaataagagatcgttatagtaatttaaggtcgaattctacaaatcgctctagttcattcaataaactttatggttatcaaagttaacctaaacaagaaaatatgaaaattaaagattgcaaataaagtaaatttgttgtagattcaattgacggagaagctagacttagttttagtaaatcagaattataaatcaaacaatagctaagagtttatttaagacccgttcttgaactcaaatcacgaaattataataaattaactctcaattgtattgattaactatttataatagtgagaatcccaacgcttgtctttgaattcttaaaactaaaccagcattaaagttcaggtttgattgttcacaaaatccatatttctccgagaatagtaagtttgctcacctaagattattttaggaaatttagtgcactctcgtgtcaactaatgatcatatgaactagattctaggttatcaatctatatctagtgagtaaacaaaatctaggtaaagaactataagattatcctaccaaatgtttaatttagaaattcattcaaactatagaatttcctaaatctaacaagtaaattacttagacatgatcaaggagaaacaaaatcataattcgaataaattacattaaaagagtaagagatagagtaagggagttgtgaatcatctctgaaagagtctgatttttctctccaatctagtaccaaaataaagcataggtctaaacaaggaccttaaaaatcctaaatatattcaacaaaaacgtcagagacttggtttgccaataataaaaacattttggaaagtttgaaattcttcaaaactttgtaaaaacgtgggagacttgtgttggcgacgagtattgagcgtgaccaatgcaatcttgatcgacaccaacacatcttggacactccaaattgttcttctcagctacaatgctccaaataattctattttgctccaatgttcgtcaaagcgtacatgtacctataaagactcaaaattaaaagacataaaaaagattagaaaactctaaaattaataccgatatcatggttagaaatcgtaaaaaccatgatatatcaacatagataagggattaatgttgcacatgagcatggattgttgagcaggcagaaagttttcaaattatatattcgagggtcacagtgacaatatatgatgagttaaattctcgaaggttctggtcgtgaatataggtgcataagattatatgaacattgacatgagactgattatgtgattatgtgtgttttaagcatgagactgtgatttgattgtatcggttgatggaaactgttagttaactatcttgatatcaaatgggcgggaatcaaagccgattctaggctaaagctcatgaaatgatgcttgaaacacaaacatatattaagacgttaaaagcataagtttttgaaatttcggtgtggtggagaggtcgattacagttggcattatcccaagttcaaaccccaaatttatatttgtgacttctattttataatttagtttgtaaatgggtttctataaaaaaaaaaactatttggctggtttaggcagtaaataattcatgttgagatggcagaaatgaacgttctcactggataaatcgttattcatgctttttttgtgatgcatgtaagtaattgtaacgcccgtgaaccggaaaatcggttaggatttgtatttaaattgtccggtttaatcgattggattaattggaaaccttagagtgtgcctgtaaaagaagaaaactcgaaattagggttttatttagccatttttcgttttataaaggagaaaaagagagagaaggagaaaaactagaattgttagggttttggaggaaatgttttcgacaaatcaaatcgttgtcaaaggtaacgaaatttggtagggttattcccaagtttttttattgttattctccagtttacagaagtggttttggattaaaattggttgagttattctcagtttcgtgagacatgttttctcagacgcgaattaggagcagcggggattgtaactgcgatcgtagtctcatcttgtttccgatcggcaagagtttttgtgggagctttttgacgtctaaggatagcgtttccccagagggatttaatagttaacgggtagtttgtattttagggttcgtctttgagactgtttgtttttgtttttcatgtccagtttgcttcaaaggttgcttttggttgtgacatgttgtaggacgtttctgaactgtttcagacgcaaggagagtctctcctgtgtttaattgttgttagaatcaatttgttaaggtgagtgcgtgaccatgagcttatctgagcgattgggttgtatgttttgttttgtatgatgatatgtatgtgtggtaaatgtgttttgagtgaattgttcgatgactggtttgtttgtgttgtatttgtgattatacccttttatttgcttgtgtgtatagctcgtagatgggaggatcgcctcactaagtatttatgataatacttacgcatctcaatgtattgttgatgcaggtctctgagagagggactgttgtgactgttgagatcaaagcagctgagatgcttgtggttcagctaaagtgtgatcgtggaatcatggtaaggaagagaggatgatctaggaactcgtttggtttattgttatgttttggttattgaaaccggttagggttgtgttacgattgttagtcattcttggttttgttggttgaattatttatttattcataaaatagtatttttgacttgcggtttaattgttgctttattggttggtttaattagatatttatgaaaatatttaattatgtttaaaaaaaaatgggtcgggttgtttcaggaatattatatcagcccaaatgaggcaatgaaaccatcgacatgtcatttatctggattaaaatttttgtttacggttttcaaacgatgttgtagctttgaagccatttaaattgttcaaattttttgtatgaaaatgtttaaaatttatttttaacaggtaacaattttagtgttggttgtgttagctatatatatacagtagaaactccataaattaataatataaatacgataaattaataaattatgtcggtcccaagttaggccaatgtaaaaaataatcaaaatcgatacgataataagataataatttttttgaaatctctatgtaaaaacatggtctcaacgatatcataaattaattatcgcaaatcttaagcatactttttaagataatctagtatgatatgatctagtgttgtttgtcttttcttaaaataagaatcttgttgaagtccatctataatattctttattgcatcaaatttttggtgttgtcttctcgacatgcatccaaaagttgtgaagagttcttacgtgtcactatttccaaaagattcacattgtcgttttcaacttctttaccaacattatagacagaaatcataatttcttctaaaaactctgaatttttgagtatgtttcattttcacccgaataatcgactattaatatttattctatatcgaaagaatatagtattatattttgcttaattatttctataaattgataaattaatttataggataagttaatatcagtataaattaacaaaattttatggtcttaatattattaatttatagagtttctaatatatatatatatatatatatatatatatatattaatggttttataatcatggtgtttcacatttacccttaactagaagcttcccctcacctaaaactctcgtatattcttttctctcaaataaagtcactttcaaatcagggtccattcaccatcttatatgtgaccttgagcaaatccttgagcaaattcttccgttaggatcaaacaaaacaaacatcattttactgggtaagtacctcacaaaagtgatttggcgataaagtctagattgtttagaatgtgataacacctataacaagctccaccgataagtaaaatctcttgcggttaatttgggttcttctaactcgactttatctccatttatgacaatacggggcgcaagacttcttattcgaagagaaaaccctaagccactaccataatgcacacctttcctctcttccactttttttactaatgtactgtcagactattaggcaaattgttggagataaattatgtttaaaatatgggcgttaatcttgtgagaaatcttcgaagattgatatttcgcctcaatctttcttaaaacacccatgaccaagatcgttctttttgtaaaatttactaatgactgcctagtcaaactcaaacccgactcttgctttcaaataataacttcgcattgagccacaataaatttaagtttaaggaccaccattgcaatcttaatcatagcatagtgctaaaggttgaaagcttttgactttcccaatcatgggttcgatcacctacttacttatgtattctagggtctcttttttttgtttccatgttctcttggggttctttttaaaaagaaaaatataaacatatatacaaaacattatgtttattaaaacttgtttgtttcaatatttcccttttgtcgttgcttttatatacatgttcacctcatttattttactaattttacaccttatctttaatcatttaatatttgtctaacatttttcatttgtctatatagtttattttttgttgattttaagactttaagaattaagaatagtttgaattatttagaaatgaaatgttttcgtataattaaaaatcaaaacttacaagaaattatcatattgtatatatcaaagaacaaaatttatatgaaagttgtaaagtagatagtcagtcaattaaatattaagtttccaacaaacgttacaatttaaaatcatgctttaggcctccaaatttaatggactagccctaccgcattaattggtcagttccaagttcctacgatgccgagtagcaaacgtagaatgtaagtaaccaaaatgtacgaattatactatttgttcatattaactcagagcatgctgtttactttattaaaaaaatacttacactatttcataaaatggcattacgcgaattgcaaataatataatgggtaaaacatgtaaaatctaaacatgctgttttagcaattgtcattttgtaacatatcacagtttcttttcattaaaaacacgtatcatgattttacaaatatcatatagtaaagttatgttttaagagaaaacaatattccattcatattcttttaaaaaggagtagaatctatgatccggtaaggtcttattgcacacgcgaacatgaagataacgtaatggaccaatgattattaatttttgtcacaggaccaatgataaaatgacaaattagacaacatcctaagttttatatgattcccaaatggacccatctctccttttctttatgttcgagaatatgcaattgctaccaacacttgcaaacgcatgcgtgcgtggaaggtactttaattgtttgggatgctaactaaaggtgatatatgaacatgagaccccgaactcatatgtcatgatttttaccacttttgattttagtttctatatgttttagttctttattcagtaatttctggtcaatggatgctttggagcaaaattggagtttttgaacagaattatgtcattgtaagatgaaaatgttttttcatttttcattttgtttttaaacttttatgagaaagtatgaaaatgttgtttcatgcatgcagaagcgtctaaaacttggcattcctaagagaccttccgacattcagatttatctcagtttttttttttctgtggtggtttttgagatcatttgcagttatgtgtttctgaatttgaaaacatgtcattctaaaatctgaaacagattcaagaacacctgtgccatcgacaccttaagtgtctatcgattttggcccaaaagatgaagtaacatcgaggaaaataaatcaagttgtggatcgcctttcccaacgcgaaaataaatcgtccttatgcactagttgtaaaaacgttatttttttttaatataatttaacattagattcaaaaaaaaaaaaattgtctccatgtctatatttatctttagtgttttcttatagtttcatacttactacgtacacattatattttcttaaccttcctattttcattatgttttctttctctatactagagaatgctttggtccgtttaattttttattttctataatctagtaccgctcttgtgattacattatatatagttcaataatcactgagtcaattttatagcttgttcctccttttcatttttcttttactaaattttgtctatgacttataaatacatagacaatacttgggcccttaaacacataataccaaccgaacttatagccttgctctattaccattcaacaaaaatttaaaagcaatagagtttcattttattgaaaacaaaacagaacaaagaaagaccgaccaagaaataacgattacatcacatgcattttaaacttcatcttattaaaactcatcaaacgtctccttattcataactcataaggttgtttgatcgatgacagaaaagtagagaatagagatatttaaatgggaacaatgttggtcacagagaccttcaccatttcagcttcaaagataatggaatcattcaccgaataccctttcgatgcatcattgaattctgctaacgatatgatagtgttaactcccacaccataatcgcttcgagtagggtaccaagctgcagctgcaaaacaagaaacaaaaaataacttatatcaactattaactttattcaaacactcgtggacattaacatgttttacttattatttttggttagtacttacaatatatttgtgcgtggttggagcttcgttgattctttaaccgcagattaaccgctccccaagtgtttgtagcaactgcgtttggcttatggccttgagcatataggaagattgggatcgcttgtgatcttccatcaccagtaccttttgggttaaatcctaatctcctgattatacatcaaccaaaaaccgttattatacttgaccacggcaaaaaaattcacataatgggtgcaatctttatgattttttccggaataaggtctaaatgatatggttaccaaaaaaaaactaaccaatatcggtcttcaacaagaaaatcatcagagtaatagaatttatcttccaagttagagaaatgaagtatcttccaagtgaaaacattgtttggagggttggatatgaatgtgactttctcttgtacttggaccgctgtgccgctgaagatctcagcaccaaaagaagcaatgtcctgctcaagataaccttcgttcgtgtcaaggaatgttgtaagaggaatcaattttccgtatccccactcttttttcgcatcattgtatcgtttcactattccatctacaatccacaattttgcaaaaacatgcaagtcacaatcaactcatcggttcatagaaaatgttaagacaaatctttgaaatctacagtcacacctttaacaatcaaatacttgcgttgcttcccattgtagacaaagagtttgagttcaacattgacttcccagccttttggaagagattctgtctcttcgatcctcacgtaaagtgaaatatggttatttccaccatcgttttgattaccattaacatacaaaactaatctcctgattcatttttatgttcacatcaaaataaactcaaatatatatctgaaaagtgaaaaaaacagtggaagtgtagttctttaccatttgtaaccaccggcctcaaagaccgaggattcgtagggttctcctctccctttgatcacggagaaacttgttattgtcagtatcttgtttgatggtcgctcatctctccacattcctgtcactccagtaaaaaaagagaatcaaaaaaaaaaaattccaagaaaatcaagaaactggttttagtgtttaaccacctccttgcccctgatttccgccgcctgtccctgagccacaaccagaaccaggacctcctcctccgccaggacgaggacctcttgggccactccaaggaccaggaccagggcctcctcctccaccaggacgaggacctcttgggccactccaaggaccagggcctcttgggccaaaaccaggacctctcgggccccggccaccaaaaccaggacctcctggaccaaaaccaggacctcctggaccaaaaccaggacctcctgggccaaaaccaggacctcctggaccaaaaccaggacctcctccgcggccaccaaaaccacgaccgcctctaccagggccaccaccacaacctcctctattcataggattggtttaaacctgatgaggaaagacttgagttacttacctcgtacgaagatttcaggatatatttttatgagtttgcttgaactagtgaactataactaaatcgaatacttatacctttttaccaaaagaaaaagaaaaactgttattattattaagaaaactacgttgttaatattaatgttaaaacgtttagtaaaaagccaatggatttgtccaaaaactaaacaaaatcctatgtataaaaatgctttaaaaaaatgagaaacaaacaaaaatacctgttgaattgggcactgagcgaaagaagaatcgataaagagaaaaacgagagttatgaaaccattttttgagatctgatttttttctttcttggccaagtcttcatttatacacagagacgaatctttttcttgaggcaaacgagacgtatcgtgttacttattgaccgagctcataattacaatataaaaagactgaatatggatacatcgtgccaaaaacaatactataattattaatatatgactacacacaagtctacacatacattattactttgttattagggatattattgtttgactttgaatgtgctatgcatacattgttattaggaatattacttactacataacatacatattcttgtgagatttgttttggttattgctatttgatttgttttggatacattgtgcgtatccatgaacttttgcttacacatattttttttgtatttgtattacattcatattatatagatataatattagtttcatatacatactttgtatatatagttttgtgtacatattatatacatactagttttgtgtgaaaatttcatactagctaaactttatttttttcatactacacctctaaaatagagtctccatccaataagttcttttcgaataagtgagtgcgtttcgaataagttctttttatgaacatggtttgcattttttgattatttttaaaaatatgtattcggtggaaccgaagtttctttataagctttctattttcttttgttgtgttggctcacgttcacaagtcattgtcatttatgagattacttcaataaaacgaaccaaaggttttggctttattttatgtttcgtgtcagtgaacgaggatctactattatatttgtgtttaactgttcaagtatcttttttttatcatactttcggttatgttcggagaattcatctttttcttaaggatttgttgttatgtaatttgtttactttcaggacttggggtcttaatttaaatggatctgatgagttttaggcatatgccacaatgctggtaattttgaggaaggataaattaattttatccaacacaatttctgtgtccaaaggtctttcaaaaggggatgggacctgaaggaatactccaaaaaaaaaaaaattagaataatttatgaaaattttgagttggaattgtcttttttttttttgtcaaaaaactttgttttcatttaatcactcaaacttagtacaaggcttaggagaatatcattctcagagtttagtacaacaaagataaaaacaataaagatagaagtacaatagtccgatgataaaaccatgctagctcggagacaagagttgtagaacacaatgccacatgcgagaagaaggtaaatcggagacacaaccacgatcgatccgggaagtggaagattggtcattgtcacaagacataatgacgttgagaaggagcaagggtctgtagtcaaactcaaaaaaatcgctgaagcaataaccagggttcgcaagagatatgtatgaaactgcaacaaaacaggtggattctctctcgcataatgtccttgactatggagattaagaatgtcacacaaagttagtctttggtttaacacaagtagaagattaccagacctgagcttcaaggttttcatgagcataaggagtttatcactgaaattgatagatttcacaagagagaactcggtgaacaaaggagacggagattggaaggtgagaaagctgcggtaatcaccgtaccttggtgatgagatcataatgccgcactttctcaacctttgtaaatggcttcgataaagggatctagaaaaaagagtagaatccctaggtgactctaataaccaggttctcaaagaaggcttgtacaagcagagcaacgatgattgattatggattaattgacatctaacaattattttcagcaatcgagacaaacgttggcagagaaaaaacaggggaaagtttagccaaaacttgggcctaatggataaaggaggtgggccgtcacttatgacaatgggccaagagagaaatgggctgaaatgggggaggcccaataacaggaaccctagtgtctcagtggctgcgatgaagagttggtgactgtggcggcaggacttcggcgagttgaagatcagagtggaatgaagcttcaccggatgttgtggcacaaaagtggtccagagactcaagatagacgagtgacggtaccatttgggttgaggaactgcaaatttggaagtgagagatctcgttagcactagggcggggttaaaatcgtcgacagtggccattggagtagatcgacggagtgaagcaatgttgaagggtatgggtaagtgatctccgagaatcaaagatggatttaatggagggttgctgtggtggtcgggaagatggagagaaaagcttagaagagttacaaaagtgatgcaaagataatagagattgaagcgacttgggatctcccgacgccggtgagcatcttgctcaccggcgtcgaaaagtttgattgggaagctgtcctcgaaaatggtgcccgagagagaaaactgaataagcagaacttcagaacctttttgagttggaattgtctaggattaggaaatatggcaaccattggatatttaagggatttttggaaaaaatatcgatcagattttttatttctctcggaaacaaaataatctacgttatatatgaaaatatttgttggtcacttggaaaaatttaacaatggttgaccctattggttatagtgggggattagctctgttttataataatgattattatgtctcaatcatttttcaaagtaatcggttaattgatattgaaccagtttataaaggaaaaactatttgtcttatgtttgtatatggagacccgataccaaaaaatagagatcaagtttgggaacgattaacacgaattggtacgactcgggatacaccttggtttttaattggcgattttaatgcattaacatgtaaccatgaaaaatgagggggcagtttaagacatgcttcttcgtttatacctataaatttaataattcaagattgcgggcttttggagtttctttatcatggagattggttatcttggcggaattggcgggataaaaaaccaatacggtgtcggttgcataaagctttaactaatgaagattggcatgatttatttagtaattcttttattgaatatctaaaaatggtagcttccgatcatgcaccattgatagccacgattgcggataagaaatcacgaggaaagcaaaattttcggtttgataaaagatggataggcaaagaagggttattagaggcaatttctactggctgaaaactcgccactggttcaggagaaaggcagtttgtggaaaaattaaataattgtaggcgggctatctcccaatggcggagagaattaactccgtacgaacgaaagacaatagaagatattaaatatgaattaaatgcggctttgagggatgattcgaaaacacgggaagagattacagatctaacattacggctaaaagaggcttatcgagatgaggaacaatattggtatcagaaaagtcggagtctttggatgactctaggggacaataattcgaaatatttccatgctctgactaatcagagacaagttaggaatcggataaccgggttacatgatgagaatggaaagtggtcaatatagggtccttattaatggacaacctagaggactaataatacctgatcgaggtttaagataaggggatcctctctctccttacttattcatcgtttgcacagaggtccgtatagcgaatatatggaaagcagaacaagataaattgatcacgggtagtaaagtagcaacaacgagcccttccgtgtttcatttgttgtttgtggacgatagttttttttttgtaaagctgataaagaacaatgaagagtaatattgggtgtcctaaaacaatatgaatcagtatcaggacaaatgataaatttcacaaaatcatcgatcctgttcgggcataaagtagatgatgctataaaggaaaaaattaaatcgaccttgggaattcataatattagaggtatgggttcttatctagggttacctgagagtttagggagctcgaagacaaagattttttcctttgttagagatagattacagacaagaataaatgggttgttagcaaaattctaatcgaaaggaaggaaagaagtgatgattaaatcggttgccgcggcattactaacttatgtgatgtcttgctttaggcttccaaaaacaattacttccaagttaacaagtgcgatggcaagattttggtggaactcgaatggggaatctagaggtatgcattggatggctttgaataaactgtgtagtagtaaatcagagggtggcttaggttttcgcgatgtagatgattttaattcggctttactagcgaaacagttatggcgtctaattttgtttccggattctcttttttgctaaggtatttaatgggagatattttagaaaatccaatcctttggaaaatataaaatcatactctccgtcttattgctggagaagtatttgttcaactagatctatggtttgcaaaggacttattcaaagagtcagttcaggggcttccatctctgtttgcgaggacccatggatcccgactcaattcccgagaccagcaaaaagtaatagttcagttattgacccatctttaaaagtccaaaatcttgtagatagccggtcaaatttctggaatactgaccacttgaaagagctctttgatctggaagatgtccagttactagggtgcgtcaacaagggaggatttcccaggttggcatttcataaaatccggaaactatacagttaaatccggctaccagacaacacagatggaaaacttggcaaataattcatctttcattggcctagagatcaaatttttgaaagcccatgtttggaaagtacaatgtccgcttaagttacaacattttttatggcaaatattatcaggttgtgtgccggtaacagagaatttacgaaaaagaggtataaattgtgatgtaggatgtgtgagatgtggctctatagaggaaacaataaatcatactattttccagtgtcatccggcaagacaaatatgggctctctcaaagattcctacggtcccaggagtttttcccatagattctatttatgcaaatttggatcacttattctcaagaatccctttagaatttgattcattcgcatatctgtggataatttggtatttggaaagcatggaatgaaaaaatatttgaaaatatcgaaaaagatccgttagatgtgttatatctagcagaaatataggcacaatcgtggcagttagcttaagttgagttcaacaatgaaaaccatgtttctttgtgatcggaaaaacaaatttgggtgaaggatatctcacaagataataggtagtctagccttcgttgttttgtggacggttcatggaaagaaagcaaaaacaattcaggtatagggtggttttgtacatcagtcaatgaagggtcgtcaactatgggacctgctaatctgtgtataagtctttctcctctccctacagaagtcgaagctttactctgggcaatgaagtgtatgattggcgccgacaaccaagaagtagctttttttacagactgttcagacctggtgaaaatggtgtcttccccaaccgaatggccagcattttcaacttatttggaggagttccagagcgacaaacaagaattctcatctttttctttatctttaatctctcgcaatgcaaatgtcaaagtagattatttggcacgaaaaatttgtgcggaaccgctacataccacttttgtaaacaattttcctcaaaataggctcgtttgagtcctaaataatatctgatgacaaaaaaaaaaagagtaaatttgaaaaatgtcatatttatgagtttttgtttgaaaatatcctatccatttttctttattaaaaactgtttttcatatattaaattactaaaagtgcctcaataaaatataataataattaaaataatttataattaagacataaaatcaattaatttaaattttaaaataaaatttgttgcaacaaacaattttgttttagatttttttttaaacaatctatgattttgcttgatataaaaacaaatgaatattttctaaaggccaatctgaaatggagagaagagaatttttagcagggagaaaaggctcgaaccagctatagttgcagttttgaaatatgaacaatggcaacaactgtgcctgatatagctgataagtgatggttaatgggcttagcctagtaaccctgtgatctctagtaaaatcataacaaataattttgttatttgtactgattttcataggtttttgggtattccatctctaatcaataactcatgcaaataaaataaaaaatattatgttagagctattaaccgtacttaatcagtaacatatatatatgacatcattctacgatgttaagtcgtaatctacagtaaccttaccttacagtgggagcagactttggagttttgtgggtgattggttgggctataactgtacaatttttgctgtagagattttgctgtagttatgttggctgtaactataacttttattgctgtagaattattgctgtaaatttttgactttaaataatttattagaaaatggattagtaaaatataatagttgtaataaaaaattttatatagtaaataaaatgccttatattactaatttaaataaatatattatgatgatataaaaataaaatatagtaaatattttttttgttatataatgttgataatttcaatttcttgtatttatctaatgaattaaaaattttacagccaataaaatatggttttgaaaatttactctcctacaacctttaaaaaaaaaaaaaaaatgggctgtaagtttaaaaataaagctaccacacgattgatacgtaatcaaagttctaagaaaaattaaggttgtaagtcggacttacagcccaaccaatcatgcacttagtttggtccgtttaaagattttttttttttaatttaggaccgctcttgtgattgaaatataaatagttcactaatcaccatgagttaaatatatggctccaaatggatgatatatagttgagtgattggaaattcttaagttgaacaaaacaaagttgaacattatttaatttattcctcttcaaaataggagatgaaagggttgaacaattttcctttatagtttgttcatattttcatttttttggttgaatgggttgaatcaattttccaatatattcattttaaatggtaaaaagtgagacgaatagccattcaacgtttccaacctcttattttaatacaactacttgcactccttttttcgaaagaatgtaaaatttatattcaaacaaaaaaaaacttattacaataaatgcatctgtttatttagaagatttcgaatgagaaacataggagagttgagagtttttctgaggtaacgaatcagaaaaagattgattaggttggaggacgcgttgagaaccataggattagacacttgtcgtagctatagtagccaacgtctttgattgaactgattctgtttcgaacggttttatcaatgagcttgatgagactagatgaaggggagtgtgtttctccgtgtcgtcttgcatttcgttcccgccatatgtgataaagggatgcttggcttgttcctcatttttatttttcgtttactaaatactaaaacaaaaaaagaatatatattatctccgacttataattacatatacaatatttgggcccttaaacacataagaccaatcgaatagccttgctgtatcaccattcaaccccattgtatatggttgagtttatccttatagttaaaacaatccaactattcccgacatcttaaaaaaaaaaaaaaaaacaagagaatttcattttattgataacaaaacagaaataacgattacatcacatgcattttaaacttcatgttattcatcaactacttgaataacggaacaagtagagatatttaaataggaacgatgttggtcacagagaccttcaccatttcagcttcaaagataatggaatcattcaccaaatactctttcactgcatcatttaattctgctaatgataatacagtgttaactcccacaccataatcgtttcgaatagggtacaaagctgcagctgcaaaaacaaaaagaaacaaaaaccaaagaagaaaaaaaaacaatttatatcaactactattaatttcatttattcactcgtggagatcaacatttgtattattcttatttttttggttagtttacttacaatatatttgtgagtgattggagcttcgttgattctttacccgcagattaacggctccccaagtggatgaaacaactgcatttggcttatgaccttgagcatataggaagattttgattgcttgtgatcttccatctccggtacctttagggttaactcctaatctcctgattatacatcaacaaaaaaccattattatacttgaccactacgcaatgcacacaacagatgcaatctataagacttttttgcaaactatatagggtctaaaaaatatggctaccaaaagtactaaccagtatcggtcttcaaccagaaaatcatcagagtaatagactatatcctccaacgtagagaaatgaagtatcttccaagtgaaaacattgtttggagggtttgatatgaatgtgactttctcttgtacctgaatcggtggacaaagaaagatctcagcaccaaaagaagcagtgtcttgctcaaggtaaccttggctcgtgtcaaggaatgttgaaagaggaatcaattttccgtatccccactctttattcttatagttgtatcgtttctgtattccatctgcaatccacaattttgcaaaaacatgctagtcacaatccatgaaaaaattcatatacccttaatatttgacatctacaattaccaataggcattaccaaaatctaaccgtatttcggaccgtaaccggaccgtttattaaccgtaacccaaccgtaaccgtataaaacggttaataaccgtaaccgttaaccgtgaaaatagatcagttacggttaagaaaatatagtaaccgtaaccgttaattaaccataaccgtatcaaaaccgtcggttaaccgcgcggttaaccatattgttaaaactttaaaatatagttgtaactgtatataattctaaataaataattatttcactaaaatagtaccttaaatcgtttaatatgcccactactacgatcgaagttactacactactctttttaccattaagtagttcatattattattatttctactcttaaaactgtttcttaatactcacaacatcttttctttagtattgtttttgtttggaaattgtaattaattcaatcattataattatgaccactaatttgtttattcattggtttatttaagaaaaatagatagatgatttactataattatttgaaacacataatcacgtaaaataaatattatttgatatatcactatttatttatttattttattataaagattaaaaaatataatattttgtctcatatattaactatatcataattatcaaataactgtaaccgaatttaaccataaccgtatttaaccgtaaccgtatttaactgtaaccgtttcaaccaaagttaagattaaaaaaagattataaccgtaaccggtggttaataaaccgtaaccgtaataaccgtagacgtggtcatacataattaccaagtaaaagtagcaataaatctgtaatataaaatggatctagtaaaattccacaaacatctaaactacctgtaacagtcagatacttgtcttgtttcccattgtagacaaagagtttgagtacaaaattgatactaccatcgtatgtaagatgatctgtctcttcggacctcaagtaaagtgagatatgattacttccaccatcgttttgattaccattcacgtacaaaatcaatctcctgatttatttttattttaacatcaaaataaactcaaatatatatatcaagtgtaaaaaaaatgtggaagagtgtaagatatttagttctttaccatttgtgttcaaaataagcctcaaaaacagaggattcgtagggttcttctctcccaataatctcggagaaatttgttattgtcagtatcctatgtgatggtggctcatctcttaacgttcttgtcactacagtaaaaagtaaaaaaacaaacatttaaaatcaagaaaatggttttggttttttaaccaagaacctcattctatttaccaccttctggcccatgatttccgccacctgtctctgagccataaccacgaccgtcgcctccgcccccataaccaggaccatgacctcctccgccgccataacctggaccaggacctgctccgccgaaaaaaaaaccaggaccaggatcaggacctctgctgccgatgccataaccaggaccatgaactcttgggccgccgccataaccacgaccaggacctcccccacggccgccaaaagcaggacctcctccaccgccaccgaaaacacaacttccgacgcctttaccagggaaatcaccccaacctcctcggtgaccaactatctccatagtttagtgttgaaaatgttaatcaaatgttataaacagagacgaatatttttcttttaggcaaacaagacgaatcgtgttacttattgaccgcgtccatagttacaaagataagaaggctaaatgtggatacatcgtgccaaaaacaatagataacttgctacacataccttattacatttactatatcttcattatctatttttttatgttgctaaaatataatttatcatcttgtaaaataggatttttgaaataagcgttttatatatttgatgttgataggaggatcggagaaggtaattaccttttgggataacaaagagatacttttggctatcacggggaattgttcgggctttaacgattacatataagaaaatgatagtactagacaagtcgaatgccgaactagtcttagagatagaatgaagtaataatttgtgactctttctctcagttatgtgatttttttttctgacacgtaagctgatccggtccaacgttatctaaagccctattcaaaattataatttttgacatcgtttatgaatgttataattttataaacaaaaagaacataaaatttttattggtaagaacaaagaaaagaatcatcaaaaaaaacgatgggatccaaatttcatcattttcagtaaacaaaaaaaaaaacaaatcagaacaaattgataaaaaaaaaacttcaatcatatatatataaaaaataacataaccacatacattttaaaagaattatttgttacaattaagttagacaagtttcagattacaaataatataactacatacattttctcaatatatattatatattgttgttgtatgagttcatgatagtgaaaaattaggataataggtatataagtattcatattatagtaaaattgatatgtcgtgttatagatgaatattatcatctattttggcctggataccaaacatctattatagtctcgctactatacataacaaatgatgaagcaaggtggaaacaaactcgctattttgtcctggataccaaacttcttcaagcttattcttggaaaattcaatatcaaccgaaattgagacattttgtttgccaatttattactggatatgtgccgcttacttcaaatccgaggaaaagagatattaattttgatacggtttgtggtagatgtgtgacgccataggagacaattaatcatataatttttgagtgtcccacagcccttcaaatatggacactaccgcaaatatcaacagtttggaatattcccattcatcacgatttgtgaacattgatcatttttttagaggacacctagcaaattcctaaattcaagttatctttagatcatgttgtacatttgtaaagtacggaatggtgggatgatgaagaggcaatgctaatgtgtaataccagggtttcaaaaagatggtgatgaatgcaaaaaggttttaaataattaatttggccacctatgtcaccaaagtgcacttatcatttaagcgtggttgggctggaaacgacaacatattgatgcatctaaactctaaagcatgtattgagtccaaattgggtcgaaattgaaaagtgtgtgatgttattttaggtaaaatcataaacttagtgtatatattgtttgagatcaaaattgggttagtaaaaatcatatttggatcatatctattgttttctacccaattttttctttattgtagacgttaactaaaccgcagttttcacgtcttaagaagtaatttataaaacaattacgcttcttttaaatcatttttttagtttgatttttagaatttacaaatattattgaaattcagagaacacaatttttaacatcagatatatatttttgtttgtagaaaaatattatataatatgtacatatttttatatacctttaattattcatatatatgtgtatttattaaccactaactaaactataaaaataatttttagtaagactttataagagttttcacccacaactacacacttgggccaattttggtcagagatttagtgactcaagaaaacaaatcaattagaattcagatttatgcctttaaacatgttatgaaacaaaacacaaccacaatataattttcaagcatagtgaaaaaatttaaaagtctaagaaaaacttatattataaataaaattaaatagagttaaatttacccgtgcatggcacaagttcttatataagtgaatattttatctaattaatggtaatcaaaaataaataaataaaagtaatggtcagtatggtacgtggaattaatagttttgattgtgaaaaatgtttttaaaaatatatgttagatggttttattgttagatgtttaacatgaagatgtaaacaccctcaaattaatggagcagctcatggttttatcaaacctgaaagaagtataagacaaggagatcccctatctccattcttgtttattcttttgtgttgaggcgcttatcaatgttatgaagcagtcagagaatgtccaaagactaacgggtatgagattacttttttcaagcccttcaatacaaaatcttatgtttgcggacgatagcttgtttttatgtcgcacaaacatagaagagagttctgaaattctaaaatgtttaaagctctatggagatgcttcgggacaacaaataaatattcagaaatctaccatttcctttggagctaaaattgacggaatcacaaaacatagtaagaaaagtatacttggcatctcgcaggaagatggagacggaaaattcctgaatgttttagtggttccaagctggctctttttgctttcattggagataagctgcgttgtagattatctggttggtttgggaaaactttatctcttgggggaaaagaagtgatgcttaagtcaatcggcatgacgctctctgtttatgcaatgtcatgcttccgcctttcaaagaacctctgtaaaaagataacatcagcaatgacttctttttggtggaatagttgtgaaggaaaaagaaaaatcccttgggtagcttggaagaagatgatgtgtcaatcaaaagaaaaagggggtttggggtttagagacttagaagattttaaccaagctcttttagctaaacaagcatggagaatacttagagaacccgactctttactagcacaattgtacaaatccagatactttcgcaacaaagatatcctagaatgtgggaatggtacaagaccatcatatgcttggagaagcattcttcttggtcgagatttgttgaaagggattctgcttaaagtgattggaaatggttcatcaacctatgtttggtttgaaaaatggataaatgatacgttgccaagagcgccagctagtaaacaatactttttcaaagtttctgatttgtttgatgcagatggttggaaattggacaaattagaagagcttttcctcccacaagatatagcacaaataacggcaatggtaccaactgaagttttggaaggtgattatgtttgggctttcactacaagaaaacacggtttttacgacaacatcaggcgactgtataagtagtcgtaacatttagcgactattgaatgactatttagcgacaaatctactactaaaataaaagggacgttccgtagtcgctaaatgacgactgttataaatagttgtccaagtagtcgtcaggtaacgactacgttacgactataagtaagtcggagaattaagagtcgctaataagtcgttaaaattgtaacaataatcaaagaatttttatagtgttatagttttgtgtaaactaagtaaaattagatatgctaaaattagactattagttttgtaattgtcaagatataagtaaaaattataacatatttcagttcaaagctttattttaaaaatgcattctttaaacaattgtacaaagtatatatatatatatatatatatatatatatatatatatatatatatatatatatatatgtatatatcactctaattaattaattaaaagggatataaatcaatgaatatatagtgattgaacattattttggtatgaagggttaatcaccaaaataacctatgattttgtataaaacctatgattttgtttaaaaatgcactaatttaattaaaaaattgtacaaagtatatatatcactctaattaataaattaaaaagggataaatattaatggatatatagtgattaaacattgtttttggtatgaagggttaatcacataaataactttgttttggatatagaccaaagttatgaaaacctatgattattacaaaaaataataaacactgcgagaatgaagaaccctaattcatttctcttcgcctctctctctctctctcgtttcttcgattcaccctgaatcttcatctctctctttcgtttcttcaatccttcctctaaattttcatcaattgttctccttctgctatcttcttcttcgaatctctcggatctctctcacttttagaagaagtgtctcctctagggtttgcaaacaagttcgattcgatgcctctagctaagcgaagaaggaagagaaaaatagaacccaatgttactcagagagctggagcctctactcccactacggggaaacgaataaaccctctacctcctcaatacaacttcacgccggcagacaacaatcctccacctcagtcatcccaagagcgagtccgggttcaaccccaactagcaaggtcattcactccccgagtctctgactatccacctccgcaagcccttttccagaactcctctaatcgtgaagtccctgtacctcttttgtcagaagaagtccagaatgaggcatctaaccgatcgattccacaacaagatcctccaggttctccacttcagaactctcatgcaagtcaaccatcttcccaaggcaacaacttccacgaacctgtggctgatgtgttaccggaactccgggaggacagtttgaaggctttaaatgatgtgcttcaaatgcctggccgtgaggcgtggaccaccgtgctttctcccacatcgatgccaaaaacaacttggtaagtacttagatgtgtcttggttagttgtctggatttgagtgtcatgtgaaatggtttgttgtgtgagtgtattgagtgtagtcgtgcgagtgtctagtatatatgtgtcttgtgtattgattggatagtgattagagtctgaagtagatgttgattggtgtattgattggaacctgaaggtattggtttgttgtgtgagtgttttgattagagtctgaattagatgtgtcttaagtgtattgattggattgttttgtattgatttattagatgtgtcttaagtgtttgttttgatgtgtgaattagatgtgtcttgtgtagtaatagttgtttttatctaatcacttagatgtgtattgtgttttgatgtctgaatcaatcttgttgcataattaactcatgattcttgtctttgattatgtggactgagtaatggttttgatgtattgattagagtccgatgccaaacataacttattaagtgtcttgttttgttgagtgaatgtgtctgtgtcttaagcgtgtgtttttgtgtttgaattagatgtgtcttaagtgtcttaagtgtttgctatgattagttgtctgtggttttgagtcttatgtgtttgttatgattagttgttgtggtttagagtctcatgtgtaatggttttgatgtattgattagagtccgatgcaaaacacaacttattaagtgtcttgttttgatgagtgaatgtgtctgtgtcttaatcgtatgtttttgtgtttgaaatagatgtgtctcaagtgtcttatgtgtttgttatgattagttgatgtggtttagagtctcatgtgtattggttttgattgtattaagtgtcttgtatattgcttgcaggtttactcgggacacaaattcaagcctggttaggaagattactaaagtatggaccaacaaatttgatggtctgttctatagctggtcatgtgttcctcgggatagacgagaaaaatactttctcgagtttgcggtataattttccttcctcttgccttaagagtattaagttaagctgctttgttttcactaacatcttctattttttatttgtagaaaacacaccattgggatcctttgataacaggtacagttcaatggcattttgaagaaatctgtaaacgaaggatgaaagacatggttagcacgataagtactagtcgagagtgccctaaatggatcatcgattctcatatctggaaagcgatgtgtgagtattgggatactgaagaagcaatagcgaggagtaagatatattccaaggctcgcttgtctgaccgtaatgggctcggtcctcacatccatttgtcagggccaaagtcatatcaaaatatcaaacatgaactggttattaacttctatctctgttttttttttaatgtgtctctgtcttaagttcagatgttgtattaagccttgttcatttttaacatcacaggaaaaggagttaggaaggagggtgactgttggtgaggttttcatcaagactcataccaaaccagatggtacttatgtagataaaaaggcagagcagattgttaaaaattatgagaagaagctgcaagagaagttgtctgaaatggaggcagagacttcaaatgtttcagacggggaatcaagacctcgggagctcacaatagaggatcatactgtcatctttctagaggtaaagtttacattttcacttgcatattgtctgcattttctcaagctctttattaatggtttggctatttttttcataggtcacagagacagatacaagagggaactattatggagttggaagcctcaaagataatcttccggatatagtcactggaaagggcaaacatgcagactctacctcctttgtgtcattgcaagagcaactgaaagaagctcaacagaagatcgaagagcaggctgctcataatgctagacgtgaggaagagcaagtccgagctgtggctaaacagaaagacaagctggagcacttggccttggtggaaaagtatttgcgccaaactgatccagcctttctcaactttatggctactcaatcatctgaagcaaccataaccgatcctatctaatcttcaccatctcagtcttaagttaacttagtcataactctcatgaattcctcaaaccttttagttgtatgtcaaattactagaatcttgtatttggtatgttttggatattgaatttggtgtttttgaatcttttcaggtttttagtttgttttgaatcatgattttgtcttgttttttatgtgttttggaatgaatttggatacaaacaaaatcagacaaactattttttttttttttgcctgaaacggtagcgctaaactgtcgttaattggtcactatttagtcgctaaattgtcgcaaagtagtctatacacgagtcgatatacatgtgattcaatcgtaacttagtcgtaactcagtcgtcatattatacgactatgttacgacaatgtttacgacatcgaggattagtcgtcgcgtagtcgttatttaacgactaatgttacgactatttgggttagcgactatggattcctgacatcgggacttagtcgtaacgtagtcgtaactactcctttaacgactacgttgcgactaatattgcagtcgtaaaaaccgtgttttcttgtagtgttggtttgtcataaatcaccctcttcttcctccagttgagcattttacacaaaatgctgagattaatatgcttaaaaggagaatatggaatctaaaaactgagccaaaaatcaagctattctgttggcatgctctttctgtggctgaatgtttaagcacacggggaatacaacatgacacaaagtgccaaatttgtggtatagctacaaaaacaatatgtcatactctattctcttgtgacgtctcgagacgtattttaggcttcgctctagtcctagctccggaccaaggtttttcttcgacatccttgctagtaaacttctctcatttattgaatgttatggaagacaagcatataccagagcaaactcgactatcaattccttgggttctatgggtattctggaagaatcgtaatcttacgattttcgaaggaaaggtatgaaattttcatgttttagttcaaaaatcgtatgaagacgcaattgcattggacaatggtgaacacgcagccttcaacagtattccctgggcaatcacctccaatttggatggaaaaaatggtggaaaccccaagaaggtattcttaaatgcaacttgaattcttcttggataaataaacaatcaatgtgtggaggagcttggattgtaagagatcatatagggcaagctaaacatcatgcacgagatgcgtttacgccaattcgagatcgaacaggggctgagttgcgctgcattctatggtcgttgaaagcattgcaagatattcacgttctccaaatataaatttcattttgtttttctcgttgtttctctgtcattttgtttctgtttctgttttaatttggcttttagatctaactgtgtactttattactttttctctttaataattatcatatgacaaaaaaaacaccctcaaataagataatgggatagaaaactcgggaaaactctcttgttatctaaactagtcaaacaattttgttttctcaacagataaagtgatattaattatttacttttaaagccaataaatagactttcttactagcttgaacatttaaattgattgtacattcattgtagtcaacatattacaatagaaatcagtatttttgtttttttgttgaccagcaaaaattacctattctttatagtaaaaataattataaaaatggtataagaattataatttattttcacttctaagtattaaaggttgaatagaaacaaataccaataaagaaaatttgtttctatatttttttttttatatatactttgaatagataattactttttttggtgaatatcattaatttgaaaatttaatactataaaataatttatatttatttatattttagaaaataattctggtgacaactgtatattaattttattttgtgttgtgtttttcaaaatgaaataatttttgatacatgtaaaatcaaaatttcatattatttacattgaaataaatttacgatagatttgactatatgtatagtaacaaatttaccacaataataaataagttagttgttaagtagatataacaatattaacaatattttaaatatcgcactcaaatcgtttcaaattatattatttgaaatgttcccgcaaaaagtagttataacaaatttagtagtgaaacaaatatttgaacaattagggaaaattaaaagactgactactccttttagatgtttgccccaatgcctcggtgttacattatgaaattcatttgtctttttatttttggtaaggcaaagagggatgcaacaattaatttgtctttttaatattgtctttgtataattttatctatagattgtaacaaacttgaacaaaaaaaattaataatgaatatttaaaacaaaagctaaatttttaatatgattgtttgtcaaaatattttcattgcttttttggtaaaatatttcaccatatccttattttcaatataaataggtgagaacatctagttgtatataccacacaatttttgtttgatctacctcagatgtcagaacatctaatttttcttgatatacttaagatgtctaaacatctaatttttcttgatatataactttttatatatcaagactgtttatatatcacacagttttgttatctaatttttcttgttagagaaaatatatcaaaaatttgatgatctatagttgcagtcgaaatctccaatttattttggtggatggaaagatgaagttatcacaagaaaaaagtatggatattcatgtacaatattaaatctatcgaatattcatcataaatattacttgtagattattaatgtcttaaaatgtgatttcttttacaaatttggtgtatctatattatattttatatgagaaacgtagagaaaatataataataattaaaatgtgtcggagggcatcttgatgatgacttttcataagatgatgatgatgaggatgattagatttttctcttatatgtacgtgaaaaagaatactatgcatttgctcttatatgtacgtgaaaataatctctatgaaattggatataaaataggaatgtgggataataatggttagttttgttctttttgttgttgttatgatcttagatctaaatttatttcattaataagttattggacgaattgatttttttttatatgtagggaaattaattagaggcagttcatggaaagaggtgataaataaatgaatatgagtgaagacaaaggaaagccataatcggccttagcaaatctatgtggcgcataagatgaaccgacttttaaacatttgagaacatttatcattgacaagtttttttatttaacggaacgaggatattgatattgatcatcttttgtttgttggtaggaagtggagacatactaaagaattgtgagccttctttgatacagaagcaatgttatattggaaaagtggcattattgacaaggttagtgattattgaatgacgatatatatattttttttatatgactacagtatattttaaaactcattaaaggaaacagtataaacatttcgatcatgactcaaatctaatttgagtttaaatcagcaaaatagtgtgaatcaaaagaagcaaatatcaaccaaacaattttatttatttaagataatctcaggaatgcatttaaatgagaatagtaaccccaaaattgaaaatatacaatatcatgatttcaaagtcgataatgtagagtctttctagcaagctgtaaatccttagatatagtcgctcttttggtaaaatgtcaaacatttggtgaaaattaggaaacaaaattacaaaatgatttgagagtgaaagtgtaacttatacccaacaaaacgaagaaaaacacatgccaacatagaaccatggcaccagattaccggagatctcacaattcttaaagtaaagtgccgtgtagacgcggtaggttattcaattccaaaccagaaactatgtattatccatctcacctttcaggtttccattttcactcctttataaaggagtgaaaatggtaaccggaaaagagatatggatcaatgcataatttctggtttggaattgaataacttatcccgttttcctgactctttactctcatttaaggattgagatatttctggtgttgtcgtgtcatggctctatgttgggatgtgtttttgaacgttttattggttaacattacactcttagtgtctaaatcatttgtaataatattatttgtcaatttcatttgtttgatgttttgcttgtactcacaacattgattgttatgttgttgtcatcacgccaacaaaacttggactagaagcaacacactactaataataaattgttctaagttgtatcaaaagaatatcatatatatgaaagttggccaactttctccatttgagtgacacatcatcacactagtgagtgtgatacgtcattctaaattaatatcattaaaaaaataacaaaacttagtaataaagaattaaaagtttcacattgcattaaatcatccattaatctcattcttaactacatattttcatttaaaagaaaaaaaatacaaaaaatcatgttaatgtatcaacactactttcattttacttttcttattttgctatttttctaatagtcattacttgataacagatagaaattttcgtgcattgcaacttagctgtttgctagttaacctttcttagtttagtaattttaactaagttttttctttttattacatatttcgtctacatgctataatctatttgtgctttatgataaattggtaccattaataataacatgcatgttttttaagtaatggtcttttgagacattaggtatagttcaatatactgacactttctccaatatgcctatatgcaaatgcaaaaagagaaacctaaaagtgttgatttaaaaaactgtttaatttttgctttattttttatttttcatatgagaactttgaaagcaaattagtagttagttatacatttgttattcaaattatgtcaatctaatatttagccatgagcctatcatgatgtgattagaatactagattaggagagaatacatggaacaagaaattgtttgcttagaatcaagttagacaactttcaaaccaaataagtaacataattgcataccattgtatcatatattgttgatctaagtatttcatgatagttaaaaaaaaattaatatcttgggtatatagataagaagatttatacatgaataaaatataatgatatttgaatcaaaagtgaatctaactatacaaatataattacataaattgaatataactttattaactacataataacatacacgaaaataacataaattagcaataaaaatagtttaacaattatttttaaacaattctcaaacaacagcgtgggtactcacctagtgacttataaaactttgagtcataatccttggcttatatggcttatgctctaggccggacgtacgtactccccgtatttatagcgaatgtgatggggtaggacttctctgctcattgttgctgattgtcgcatttactcttcggaaccggtgaagatcatcagacttctaaaagaaaagaagacaacagaccgaccaatcagctggtgggcggaacagcggaatggatagatcgaactttattgacttttggtcaaatttctctttgggggcaaatctccttctcggccgagtttaagagatagggtgaagccaatgtccaacatttggcatttaacatttgatcaagaccattaatcccttgatgcataggatgaagactagtctttattagagtactttaactaactttgtgaaatcgataacttttgttagagtagtttaattatcttttacgaacttgatgactataccacaattgaacttatagcagaatgattttgttttcagttgaagtataaataactaagatcatttttcttccgtactattttaacatcatttgacaatatatagtaacacttttgatggcttcatatagattgtaaatgtgtatacctaatagcttgacaaacctcatatatgagatctggaaacaaagaaacagaaggttcatccaacactaaataaagaaacaactattcttcatctttcggtttaaatgcaacatatataatcttgcatcgaggttcattcaaaactcaaaactagttctccatatgtttctccgttgcgcaactaaatccacacgctagctaatttggcacttcaaattctagatccttcccactaatttaaaatcttttgctatttatggttcatcttgtctcttcttttgtaaggccgttggttttattttgttaagctttcggaagcactacgataaaatcatgtaaaattggactttagaaaactatccatatatgtcattaaaccgtcgtaacgaacaagtgttgataggaatctataaatagttcatcctattgataaaaaaaaaaaaaaagagagaatatgcacaaaatagccaaaatttttattataattaacaaactaattatatgctacagtacattgtcagaaacatgttggagagcacatatagttacctaatcctttataacacgttttctttgaaatacatgcgaaaacataatatctctccttttatcatgttatttttcgtattacatgttacttataagaagcatatgatatgttttggaaaatcattctattaagtttaataactccctttatcatgatattttgtagtaatacacgttttttatattaaaataacacgtgatttattttaaaatatattattattttttactaatacacagtttttattaaaatcacatgtaatttcttttttaaaggattctattcatgtaaaaaatttctacaacaatgttttttcttaaaaaattattacgttttttgaaatagcatgtcttttacctaaatgtaacatgtgaaatttaaatgttacatgatattttgaaaaattacacggaactgtctcgtttactgttcatttcgcaataaataaaaggtagttttgttattttactccttttgacaacgtgggtccataattattttgcaacaaaaacttttctctctactaattttttaatttttatgttttatttggctattaaataatattaccaaaaaaaatgaaatatactatgtatacgtatacttatggacaacacaaaagatcctcatactatgtatttaataagttaagacaataagataaaaaaccctttgtatttctaacttatttgtttgttctttaatttgaattctttgtactaactaattaacaactcttataaattcttgagaatatgaaccaactaactaacagaacatcacctaaaaaatataaagagagagagagagtcacattgtgttgtcttttaacacaaaaaaaacatctggcattgatgaaaccaattggatttgttataataagttatcaacaaaacaaaaaatagaaagaaaaaacagatatgacaaaacaaatacaatttctgtttgttaagatgaaacatccttcaacgtccttacgcgtcatcatcatccttacatggaggttctcgatcttcttctccaaatcattcttccttaatccattttctcttctctatctctatccaaatctctttcttccaaaacctattttctaattaatttgatatccattgttcgtttgtttcctttctcccattcttgcatctgctaaagaagccacaaggtgctttgttcacgagcctctaagaaaacatcgacaccatttattggttgacatgtgaaaccaatatttaggttaaaatttgtcatcttttgtatgtataagttgagaaccgatcatgtcatttagatcacattcgagagggagtagtcaattcgcagagaaggtaacagaggatcctgtaacgtacaagacagcacaaagcaccgtgacgtgcatttaccaagcgcatatatccggattctggaggaatgttacggtattgtggtcaaagaatctcatgaatcattcgcttatggtcatggtgacaaacgtggaaggcgatatgaattattgttgcaaggttgatctgaagccttggcatttttggaacaagaaaggctacaagtcgttcgatgtggaaggtaacccggtagaggtgtattgggattttaggtctgcgaaattcacgagtagtccagagccgagctcggatttctacgtggctttagtctcggaggaagaggtggttttgcttgtgggtgattacaagaagaaagctttcaagagaacaaagtcgaggcctgctttggtcgaggctgccttgttctacaagaaagaaaacgtgtttggcaagaagtgtttcaccaccagggctaagttttacgataggaaaaaagaacacgagatcatcgtggaaagctcgacctccgggcctaaagagccagagatgtggattagcatagatgggattgtgttgatacaagtcaagaatttgcaatggaaattcagagggaatcagacagtgttggtagataaacaacctgttcaagtgttttgggacgtgtatgattggttgttcagcatgcctgggacaggccatggtttgttcatattcaaaccagggaccaccgaagacagcgacatggaaggaagtggtcacggtggtggtggtggtggtgagagcgatacaagtacagggagcaggtattattcgaccaagagtagtaacccttggccgccagagttttgcctttttcttcatgcatacaaacttgagtagtagttcttggaaacaattaagaagcttttgtctattcacttattgttgtgtcatgtggctgtaaatcttatcttgttcttcatcttttattgacaaatgataacatcatagtcctgacttcaaacaacaatgtcatgtcgcaggaaactattttttgtttgaatctaatgttaaattatattcaaagaaaaaacaaaagtttacacatgtttaatgcaaaaaatttcgtaacttttagtttaaatctatccttagcattgccttgtcgcaaaccaagtttggatgcactccgcgagcgatgagtttcctccccttgtgccgtagaactatttgtaatgctctgtagtatttgaacccaagtatttttcattttaaccttctttgcaaccaaatgaaataaattatatagcctcataagattgagccaacgaatctcttgaagcactttagcattgagagaaactcttctagttgatgcaagatattcaaaaaatagatattcggatggcaacaaatctaaactttatactatataaaaagattttaacccgcaatataccgcggattattatctagtatagaagtaataatcttctgatactcttcctcaaaaggtcaccaaacatttagcatctaacatatatggtagagcagccaagtaaacatttcccaatggccaacaaaatacaagtctaagatattaagtagattcgaacacaaggtgacatgaatttgaatcccagagcacaatagccaactcgttgagcatctcacgcctcttctcaaaatcttcgagcttttcccttccgatgcgttttgtggagaaagttgctttcttcaaccgtcttgcgttttctaggatgtatgtggcaacttctttctcatcacctcgttgccattcatatcctatccacaagaatgtctcaagatggaacaacaaacattccggtgcacattttggtggattccattttcgttcgtccggatttgttttgttgtcatgcagatatacctgggaacaatgcagtttatgtcatctaaatcaacaaattacctgaaagtggagttgtggaaacaaacaactagtgaaattgcttacatccgtgagcttgaggatttgtagtttaggagaactatcaagcatgatcgaaagcagattccaccactctctttcgtgtgtaagtagctctagacagcctagttgatcgaagattttaccagtaggaactttaacctaagtacatttccacaaaacagtgtaacattgttacatacattttagatacacaaaaacagtgttagcccaatttgcagagaaaataaccaagcgaaaatgttcaatcttaagcttacctcaaggggtgataagtgtaagataagacgtttggctgaagttagagactccagaatgttctcattggttataccagaaacgttactgatttttgcctcctctaactctagtgccttgtcaatcaaacaagactcaatatcaataaccccgttgatgttcaagtatttcaaaccaggggcatttatcacatagcttccatttccataacctccttcttgtctaagatcttctatggtcaatctttgtaatgacggcgacgcaattgtgaaagtcgccacatcggcattgctatatctatgcacgaccaaatcttgaagactagggcagccacataaaagattgcaaacagattcttcgtctttgaaatgtacttggtcaaggtatagctttctaagagacttcaaacaaacccgagaaggaaagtctaaatcgatagcaca

SEQ ID NO: 165 - DNA, 81341 bp, Arabidopsis thaliana
aagcttctccagttttcgacaatgacacaattcctaggttaaccagaacatacctacgaaaaagaagaagcagcggcgtacaaaatcgaagaagctaagatagaagtgagatccccaactcaaaattgataatcgattaagttgcagaaataattggaaatttgattgaaggaatacgatgaaaggggtgagaatgagggaatagtaaaaagaaagcttaaaacaaaagggttttagttgtgtccattagattcattttaatcaacggttcatattagaaacaatgtgatccgtactttaatgggttaggcaatgaaatagatttatttttattttctgcttttattggttttgcttttatttattttcttataccattttaaacagattaaaaaatgttatatatagtaaaacttttataaattaatattcgataaattaataatttttataaattaataaatttttcgggtccggagttggacccagtgtaaaaattgttataaatcaataaattaatatgataataatttttcttaaaaatcttatataattatatgttcccatcaatagtataaattaataattgtataaatttactaatatatattataaatatcatatgtaaaatatgactatagtaattttgttcgtcaatttttattaattctttgtagtgttcaattctagtattttacaacatcaaaaaaattttgtactgctttctaaaactacttctctaatttaatcaattttttcattgtcttattgagagattgacctgtctgtatacttccatcataatgaccagactgattgttgaatgtagactgattattatccaaggtatgaaataccacattcgatattctcagattttcagattttaacaatcgatattctcagattttaaagtttatattaaaccctaactctataatgctcaaaatcaatacacatacacaatagagtaaccgtaaacaaagcacaaaatcatagataaaacaatagaagtagatcttagcgagcaaacaacaaaacaaactatcgaacaaaaaacgattaagaaaggagaaagaagaagaccttacccctatgaaattcgctgttaagatttggaaagtggaagaagatgtagaagatgatgaatttgtcaagaagaagaagaaagtgaagaagtttggtttcaaaagagttggaggcagagagaagtcgagagagtggaacccaacaattgggttaatgaaacattaaccttctatacggtttctaatactcagtttaggttaaccagattggactccgataagcgaactgacccgaaccgaataccgatagctccaattaatttttccgaacggtttactcctttgctacttcaattcgccgataatcgaatgattcggtttttctggtttggtttactcagtttaaccaaaaatccaggccgttgagcagagactggtctagtctttacctttgatttgtcacattttgattgtttttcttttactaaactatttaggttgggaagtcttctatactttggttaggaagagttcaaattatcggatcattgtgtagattggttgaaccaagatggtttagtgattaatcaaaacacatacaatgtagggtgaggttggaaaattccatatacatagctccataaagagtaggttatggccttgatctgagtgacatgaaacatgggctttagagatgggcaaaatattcgttaggattcgcttcaatccgttattcgactctatttgttttgaaaaaaccggatatttgtaaatttaggaaacaaatcaaatataaaaataggtatttatcaaagtaacaaatactataactttaataggtgtatatccattacgctctggaatatatatatatatatataaataattgcatatataaattctaattttattgttcttatatgtgttttataatattatattcacctaattaatcatttgaactactagttttaacaattaaaggacaaatctatatttcttataaaaatttattatttttgataaaattttactacttttgggattaaattttaatttttttgtattttttacttttaaaaaaataatatttaactaatcggatatctaacaaagagtttagattttaacggatattcgtacagccagatattcagtctccaacaaagcaaatacaaatcggaaaactaagtaatctgataaagcaaacggatcacaaataccaccaaaatctcagaaatccgctccgtgtccggccctaatgggcttagggcccctttttgttttaaaaaataaaataaaaaataacaaaaaataggcctccaactttcttaatgtttaaaattttgtcttgattgtttgaaatttgtctagaaaaccctaaataaaaatttgctaagatcccaaatttctcagggtcggcacttgaacttgtggattggaaactgagagagatagctcttgtacgtgattttttattttgctagagatagctcttgtacgtgagagataaattccaagaacctggagtttttaaaatgatgagagttttgtagaatgactcatatttttaagatagttatcatatttgtttccttactttttaatgtttttttttcaaatttagagttgaaactaaaagactcattttcctacctttttagttttacttaatcatttcaagtttaaaaacaaaaattacataatgctaaaatagttttaaaatattattttaaaaaaaataattactacatctatataattttaccaaattacttatctacttgttatgtatagtatcttaattttaccgaataatttctcgatttagtgaaatacaaagcttatttactttaactctatttgtgaatttggaataaataaattttacatatcttaggtcgtgtattgctaatatatttttcttttgtagatgtattgacttgtgttcaagatttaccgtaaaatcatttcacgtcaaagattcttacgagactaacaacttgtaaatacattcaaaatagtaaagtaacaccgcaatggacagacttatggaagcaactcccaagcttgaatcttacaaaatccgagttcaaaatgttatcttccaaggtgcaaagtgtagaggagattgaggagagtaaagtggttgtggtgtcgcaaagtatgaaaactattgaaatttttctcaaagttccatgtttgtagctgataacaatgaaagttgacgacaaacttaattgatgcaccaattctcagctttttaaaggtcaagagtgcaagatctggttcttttacgatacgacaaaactttaacaaatttcaagacacactttcaattaagtttcaacaaaaaatcttcttagtgcattaagtcgatattgtaaagagctcattattcatcgtagttattttgaagaagtaaacattcaaatttttgtttctcccttgcttgaatcttaatcatatcgcatatgttgacaatttttcatttcgttatatagaatggtggactataataagggaaaagaagaggccccttgtttcaaaatctaactagactcaagctcttaaagttaagagctcaccagtcactggttcttcagatattacttgctacattatatcaatttcttatgctcaaaaatgttcacttctgattgctgagtagatgaaatattttagtttgagatcttttaaataatttttagatcaatttaaataacttacaaatttgaaagaactatggaagaactattcataattatgctaaaacaataatcaaaatatgatttataatatcaacatttcaataatggtctgacttatcctattattaatatgctacaggatatgttatgttgccatgtaatatgttttcaagttttaaaaaaaatcatggaaaataacttaatctaccaaccaaaatattattcatattactatctttaagataattatttttttactaatctataagctgggcataatgtccgaatccgagcatccgatccgaatccgaaaccaaaatctcaaaatatccgaatcggtttctatactttcaaacccgaaaaatcggtatccgatccgaaccgaaccaataaatgcgttcaattccaaccaaggtcaactagattggaggaagagaagaagaaaaaatgttgggaagcataagcctcatctcctgcaacttctctcgccttccacgtcttcttaaaccctccactcgacctcaaaccctaacacaatcctcaagcctccttcttcttcttcaatcacgagcttcttcttcaccacatagaattgcccttttcccgaaatacgagaagaaagtcacattcttccatatctgcaaaagctcttcaaacaacccagaagaaccagagaagactcaaattcaagatgaaggaagagactggtctagctcaattttgctttttgcgctttggggtgcgctcttgtactattgcttcaatctcgctcctgatcaaacacccgtacgcaatcttcaaatacttcataaagttacgattttgcaatcataatataatcttaggtttttgtattgcagacacaagacttgtactttttgaaaaagcttttgaatttgaaaggtgatgatggttttagaatgaatcagatccttgttgggttatggtacatcatgggtttgtggcctttggtttatgccatgctcttgcttcccactggtacaaggtaccatccatagtttgttcaagtgaagctcttttaggaacttcaaacactaactaatagagctctttgttggacagtaaaacaccggcttggcctttcgttgtgctttcctttttcggtggtgtttatgctttgttaccttattttgcactgtggaatcctccttctcctcctgtttcagagactgagctgagacaatggcctttgaatgttctggaatcaaaagtaactgctggggtaagagattatctctctcactctcactcttttgaaatcttgatttgttatcactggacttacaagttaaagaaaattgtctcttgccttttggtctttggttgttgttggattatgaatcaggtcactctagttgcaggactgggtataattctttattcagttgtcggtaatgccggtgattggacggagttttatcagtactttcgagagagcaaatttgtaagcctcatttccctggaaatgttttcgtatctgtcctcatatttgacctaaactaaaatgcagattcatgttacaagtcttgatttctgtttactctctgcatttgctccgttttgggtttacaacgacatgaccacccgaaaatggtgagttctatgtacaactagtttgcggtgtttactcactcaaacctttttctgtttctctaaacgcactgcttctttatcaggtttgataaaggcagttggctgttaccggtatcggtgattccattcttgggaccttctttgtatctactcctacgaccagcagtgtcagagacgatagctcccaaagatactgcatcatctgacccaaatcaatagcaacatcaactttctcttttgctcgatgacaagactattgtccagaagccccaggaagatttcacaggaccgaccatcatatttctgatgcatgaatgctgatgataacattatgaacatgataaaccaccaacgtcacaaacgtattctagaatacaaaacctaattccggatcataaggaggatttcatttgtaccttttgttttcagaggatttcatatggttaataaagcagagaagttttacctaaaggagtttttcgatccgcgtctacttttcgaatacttcagctccttgtataccacaatgatttactctcttctataggctatagctgatggaagtggaatcatataggtattgaattaacaaaaggagaaaaacttcaagtttattgtagatataacaaaatgtggaaagtcagactgaaatatatggagtttgtcacaagtccaagaaaagtttttaggcatataacttgctgagttcatctttgaacttggactttatttgttctctctttatcttaagagcagcagtgaccaatcccgactccggtgtccacggctctgacagcaacttgatctttgctggaagctcaaacttttcgagctttgccgccttcccggcctgaaatgataataatattttgtaatacatatacttaccaaacgtaattgtgaaaaacctgagacagctattgaaaatacaaaccttggtaagagattgttgaacctccttgactgcttcacctttctcgcatagctcagcgaattcgctgtgtttaactccagcttcctctgcccatttctctaatgctcctcgtgatggaacaacaagagctacacagtagctgttaattgggtctgcgtggaccatgatgttatcaacgtaattgctcgaacccaaagctgcctccacctgtgaattgtgtgatccaggcaatgaaagagcatgatgagattttatcatataccaccatcctctatgtagaatttaagttctataggcaaacctttccaagggatacgtattccccatgttgaagtttaacaatatctttctttctatcgatgacttcgagacatccatcagggtggaatctcccaatatctccggtgtaaaaccaccttgtgcccttctcatcgacctgaaatcgtcacatggattctcagaaatctatatagcaagcggatcaactaagctccctgaatgtgctttaccttgtaaacctcatcggttttttcttgattgttgaagtaacctgctgttacactgttaccacctaccacaatctcccctctaggcattggtttatctgaaattctgtagccaccttcttcccaagaaacgagctgcaagatgaaatttgttactcatgattacaataaacttgcacattgtcaacatggtgtgttaaagattgtctgcaaaccttaacgtagccgcatggaagtggaggtccaacacgaccaacagcaggatcgtcccactcagaaaacgtagctccagcacacgtttcagtcaatccatatccttggccgatgggagacctaacagaaaataatgcacaatcataatcagaacaaactaatcccaagcattgtgaatttgcaaagaagaatacagataaacacaaaccaggcaccaaaatggtgtttgtctaagccaaaatgggacaagactcatatgaaaatatcagatgtgagactacattaccccatgcagatattgatgaagcgttgcgaatcaggagacagaggagctcctccaacgagcataaaacggatgtgtcctccaagcacagcgcgtattttcttgaagacaagagcatcccataacattttctccaaaccccaggcaccaaaccaacttccatccacagctgctaaccggcgcttgtatgcaaagtcaaaaagggtcttcgccatccctcccttttcctcaacctagattattacatacacaaattgaagtatctagtaagtaactccaacaatacacacaacattgtcgtctctaagatggtacctttttaagaactccttctcggacacgatccagaatagctggaactgcagtcattatagttggcttcagagctgaaacatctcctttggttcctttcttaactttatttgaagtgtcagttaaagtcattgctgagccgtaaccgatggcactacctgaggtaaagaccacaatctgaaaaaccatgatttggcaagaaacagtaagaaaataagttagcagttaaaatgagagagacatagagagggagagagagtacagcaacatacctcagcttccagctcaaacacatgagccaaaggtaagtacgcaatatatgtatcatttttatccaactttggaaccaccttcataactcctgcagcagttgcgacaagatttccgtgggtaatcataactccctgagtgaatgcacacaatgtaaggtacaccaatcaagaattcaggtgaacaaaacacataaagaaaagagaagacacagtgcaacacatacctttggtagaccagtactaccactggtaaacattataacagcaactccattcttcgaaggtaagatcggttgaacagcgttcttctgcccaagtttctcaacttcagagatcgacgaaacagttatatcacccatactattgacatcactagaagcaacatctactccatcttcttcaatgtaaataatgttcttcacagttttcaagcttgattgtatcgcagacaacttcttaagttgttttgagtcacatattaaggttgacactcgagtctgtcaacaatacacaagcaagattcagagatccaacaaccaaatttactaataaaaaacatacacattcaaaacttcccctaccaacctcattgagtgagtaaatcaaagcctcttctcctaaagaagcataaatagtaacaacggttatgctctgcctgaaacatccctggaaatttacaacaccaaccatttcatcagacaaattcaagccaaaccaacaaaacaatagttgataaacaaacctgaaacgcgataaaccactcagcacgagtatccgaaaagatagcaacacgatcatcaacattatgtcctacattaactaaccccgacgcaaagttacaaacacgttcaaaaacctctccataactttgccatttatactctcctaaatgaagcttctcaaacttcctcccatcactagcagtaataaattccttatctataaactctctagttcctagtaaccgatctttcgaatacttcttacaagactgctcaaacaaagcaggcatagtagcagctccttcccaaggtacatcaaccaattcaggagctcgagcatgacgcattgtgtaaccttcctcgccacctactttgatgggaacacctctctttttcccctttttggttccattcaacaccacagagagtaacacaggcacaagtaaagccacgattccacctcctatgattccatagactccaaagtcactgcctttagatggtgaatccattggattcactccagaatcttccataagcgcgaaagctacacaaaggaaaggaacaataacactaatcacagtgatccgatgatcgatcaagcaaattcaaaatcggtagatcacaacagaatccaaagaagctaaggcatcgagaaaaaagaaacgttttttggaattgggttacctacgaatagattgagaaatcagtgaaaggaaacttcttgatgatttcttcgaatcgggttccagagaaaaacgtaaagtttaaaccttttcgatgctttgaagttgtgaacaatccgaagcttgtggactctgtcctttttcgggaagcctttggttaaggaatgtttcgtcggtacggtaatggacacgtgggagatggctaatggagggacacgtggatgcttctccgtttggctttttcttgccacgtttacctgaaattccggagacgctacttcgttgaagttctaaagattctccaattgaatattgtgaaaagtaaaaacgctgatttttcaattcagaagccaccagaaacgtcttttttcaaaacgctatatttcactcagtttaaaaaagcggttccaattttgcgattttaaatattaaaacgttacacccataaccgagtccgagttatcaatcaaaccctttataagcattttgatgaaatgtgtgagtcaaacacatatgaatacacaaagcagttccaaaacaaagtaagaatattcatatctccatttcaaagatttctccgttacaagacagcttctgttccttctctcaactgtcctaaatgatgcctatgttcgcttaggagatgaccgagagtgttcttgagtaccaaattctcaagatatatatatgtctattaactaggaagctccaattgaattgaggaaagaaaatctaactggaaccacggcgaacactttcttcggttcgttcaagagcatttgttagcacgtctattgtccagtttttcaagtcatcctgattaaaaaggaaacaagcaaaaggtttggtcatcgagtgacgatatgatttggtaagatactgcaaggattggtgatttaatagagcggtttaccttgcgcacaggttctccagttcttatttgtgcatttgggcgagcaagctttgactcaaaaggtgttcttggccttacttctctaaactcatcccactcctcacgatcgatcattcgtaccgtgccttgcccctgtggtgcattctttatcttgcgttcaatcatttcttgcgatttcgaatcatcgatctaacaacaaaccaatactgagaatcagcaatttccacagatccttcctaattcaattgcacaaaaaagtataaagcaatctaacagctcaattacgaaacaacttctacttaacagctgctaaagtcactgacaagaaagacgcattcaaagagatgacagaggaaggcttaccatcattagcacctttgcaaataatgcgatacctacaacagcgaggaacataggcatcgttgctgtgtctaaatatgatcttgattctggaacctcaactagaaactggttctttattgggttccttcgcttcttactcttttgcaaatcggctatcttctttcttaaggtctccgttggggcatcattagacggtgaatgaaaccttctcctaagcaatgtaaataactgactctgtcgagacatcataaccagaaacagggatcttctttctatgccaaagataaagaaaaacacagtttagccaaactggaaccataagccctactccaacacaagcatcaagcagaaattaacttttaatggacagttttgcatataaagttcaatcacagaaagtaaaatgcgacagatttaagctcatgtggaaaagtctctctttttcttttaccagaagccctattacaagaacacacctatcctggacatggtggagactatacctctctctctcataatgtcctcaacaaaaacacttcagagatcatcacagaagcttcaccacatagaccgcaagtcctaagttccttgataatcctaataagaagctgaccatactaaaactaaatcgatatgcaaaccaaattgcaacttacttactgtgctatacttagaatctgctaatgcgctatgcaacaagaatttattgacatgcccaaattttcaagaaataattctataggcatactatatgtaaaaataataatctgatctggaatgtcaagtaactttcgttgcggcatttttacgaacactttgtatgcagcttttactcaacatgagacatatgaaagattcgacatttttgcaacaagggacaaagagatatcgagatgggtactgaaaaaacttggctttgaactagaaagatcattctttaagcaaatcaatgaccaaatcagaataattttgttcgatgattgaaactctaagggaagagatgaaaatgggttaaagagatgaggagattgcagatgtaaacgtaccagatcaagaggggactgagtagacaaaagagactgttttgatctccacggtcttccaaaatcgaaaaatcgtctggcagtcctttttgcaaagaggaagccaaaaaatcattgtaaaaaacagaaataatttatttattttttcttaattcgaaatagatggatattactagtatatccttatccgaacctattaattaccagaaaaatcatggttcgtttccgaaccaaaccacccgaaccacttttactctttatttgaaaatcaaataaaaaaaaccttaatatttccagggattttccaattcgaaattgtttcttgttctcattacaaccgttttcgattttttgacttcttctccttagtaaccgctgaaattaaccacaacattccctatttctttaaattcaatcgagcgttcttcttgctttcaccagtatttccgttctatttccgattcgaaatcagtcatgccgcctaagacgcgtggaggaggtcaagggaaaagaaaggagatagaagcgccggcgccgacgaagacagagaaagttaaggcgccggcggagaaagtgaaggagaaggtgccggcgaagaaagcgaaggttcaggcgccggcgaagaaagagaaggttcaggcgccggcgaagaaagcgaaggttcaggcgccggcgaagacgactgcgacggcacaaacgattgcgacggcgatggcaaccaatgcggctccaacgacagcggctctaacgacaacggctccaacgacggctccaacgacggagagcccgatgcttgatgattctacgttttatgatgctctgaagcatattccggctgaagaaactcaagagaatatgcaaactgatgaggtggaagatgaaaatgaaaaagaagaaggaagtgaagaagaataatcagggagtagtagccaaaccttgggctccgattccgattcagaggagacggagacaaacaaagaactcgcgtgtgctaatcccgtggaagaggcggagagacaagatgacggcctagccgttatcgaggaggaggaggagaggagctccgcgagcgacgaggacgtcaatgtggaaaagtccgtggaggatgagggagacgaggacgagagagacgaggacgtgatagtggaaaaacccgtggaggagaggaccatagacgaggacatcgcaaatgtggtaagtattccatttcgtaataccgatctaattgggtaataatgcaattgtgaactgtggacagtactagtaacattgggaaatgctatgttgatatttaggtaatattggcggatgtgggtaataccttagagtaatactacaattgtgatttatcagtagttagtactagtaactttgagaaatactatatagtaaaataggagtatctgtgttatactggtaattacggggaatacttgtaggaaatacagagtaataatgtggcagtactatttacaattgagtgaaatatgaacagtaggatttgtgtaatactggtaattacggggaatactttttggaaatacagagtaataatgtggcagtactatttacaattgagtgatatatgaatagtacgatttgtgtaatactggtaatttcggggaatactttttggaaatacagagtaataatgtggcatactatttacaattgagtgatatatgaatgaatgtttgtttctttcaggatatggaggaagcgatggcaatgcagccacttggtatgtacttcccggcgtcggagtataccaagaagatgaagttagcaacgaggtgttatatctcggaggtgttgaagaccttcgctgacttggaacatcctctaacgaatgttgaaaataattattttatggagcatccgagtttcaagcacatctatcacctaccttccggatatacccacaagttaatgaggatgtggatgctttttcttcgaacgacatctattgagaagaagaaggaggtttggttcgttgttaatggagttcccatccgctatggtattagggagcatgctttgatctctggtttcaactgcaaggcctatccagctaattattagagtgctggtaatatgaacttcgccaacaggtacttcaaaaccggggtaattagacgtgaagacgtaaaaaccaagctaatggagatggaaccggctagatcaaaggataggttgcggatggcggtcctctattttctaacaagcagcattgtcgtgcctactaagactggagaaagggctagtccaattgatgatttctgtgttagggctgcaagtgatcttacgttttgtaagacatttccatgggggagatattcatttgagtacatgttaaaatcgatctcacacacattggatcattttaacggtgtcgtcccaaacattcagtcaccatggcctgttcccggattctgtgtgccgcttgaggtaagtcttttgttttatccttgttacattttcgtaattgaagctaacaattaaatttcatgtgttttgtgtagtttttagcatttgaggccattccatcacttagggaaagattcatagaagaaaaagagggtgcacatgccggttgtccaaggatgtgcaaggtgaatttcaagaggaccgagatgaaaaggtttacccttcagcaaatcaaccatgtactcggaacaactgaggttaggatttcctattattccttgagcaaatatgagcaaatatgattttatttctttctaatatttcattgtctattattttcataggtcattgagagtataattagagagaaggctgaagaagtaccccttttggctgaaatcacgggagtagaggatgatgttgataagcacgatgttgtagttgatagttggatgaagcgtcttggtcaaaggcgtgaaattagatttgaggaggtgtacaacgaggatgtgcatgcacgaatgaaagccccaaatgaagaggaagttcccacagttgttggaccgggagacccgacgttagttgatgtaatggagaagctccattccatcaatgacaagctgaatgaagcttttttggcgcttatagaaatgaaggaaaaacaagcaacgttcgaagcatttatggatgagatgaaagccaagataaatctgggtaataccggatatactgttctataattggtaatatcgcgtaataccaagttttaactaaattaacaatgcagatgtctcagaacccaccagatgaggaggaatcaacaatcaaggaaaatgcggctgctcctgttgtgccctaacgagtgacccgttcaacccgtgcaagatctagtaacgtgtgaaaactattcgtgtaacttctccggatttgtattttgatttcttgtactttgactttgttttaggatttcgcaagtactcgtaaaactatgtttggattcaattaatctattaggatgttttatgatattgttaactgaaatacgggaaatacctcgtactattactactaggagatatactggaaatatcaaactgaacaaccatagtattaccaatcaaagagaagtcttacaatcgaagagaaagtcttacaaagcatactgaaagtcttacaaagcatagggaaagtcttacaagcaaattaacaataagattaaggaacaataggataacacattacttctttggatccataggattacagaataccactttgctcagttcacaatctctgcacggtgggctttcaattctttttgcatttcttctatgagatactcatgacttagaactttcttccgattgtaatcaacactctcccttaagctactcacctcttcttccatagccttatcccaaagtttacggatgtgcatacaatcagttctatcatcctacaaagtaccaaatatttatcaaatatagatctagatctacaaaaactagaaaaacttgtgcagtattacttgttctaggcagtattaccaaaacgggaaatactctgaaataccaaatatatctagatctagatctacacaaacttgaaaaacttgtgctctacatcaacataccttaaacttctcgcattgatagtatctcttttcatcctttcgagtctcgacaatgctaccaccacatggacaaaacttaggaatcccttccatcatcgcaaccatttccatttgctcaatggctctcttcgccactttcatatcatcgtagtaggggtctctctcacacagtctatccatggtagaaagatgaaagaaagatgagagatgtgagaaaattcgagtcgaagagagagatgagagatgtgggagaagagagatgagagatgaaagaaagttgtaagaagagatcgaaaaagaaagaggaaaaagaaaaaagtgaaatttttggttttggagggaatctcaaaatttgttaggcgccaaagattttggggaaaaaccaaaaaaaataattccccacgtgtgtgccgttttttggagatttttgacatgtgcgcagcctttttacagcatagtatttcctaaggttttggtagtgccaatttctcaaatagtattactttccatgtttttcatgtttagcagtatttcctatatttacaatttgtttatttagtagtacactggatggaactttataaatatagaggtttaaatattttgtgcaattataaattaaatatgtgtagcaatatgaatttttcattttaagttggtgataatattaaaagtgagcttaaaagtataagtgatatgttgtattgaatctattaaagataagttaaaaaatttaatattaaaatttctaacttaattaagtataaatgattaataatacatttttatctgttaataactcactgtattcattttcattgagttttgaggtaaacaaattcgaactccataacaccaacgtagtattaacagtagtactaatatgaccacaaattcgatagaaacagacatgatattacttgttataaccagtattacaaaaaaacaatagaaacagacatagtattacagaaggggaaatacagtattacatagtaagtccataccataaaaacaacaaatcactgtagaaacaaagtaaaaaactcagataggcgtattcccaaataataaccattgacacgattgccttggacgccttttgttttgcgtcctttgtcgttttggccgcttttccccggttgatggaaaccttagcatttttttccttcctttcttcggttttttagacagcggaactatcttcaacgcctttacttcatctggtacttcccactgcgacctatccggaacaagataaatagtcctataataggctaatgcccacaactccgcccaataatattttgtaaccaaatcatgtaactccaaacctcttctccgatcttcatcatccataatgttaatgaaagcggctaatgcatgaatacaaggatatttttggatatcgaaaaccttgcaactacaagttttcaaaagcaagctcaccgtataatctattcctttgtcgcatgtgactacatattcacgctcgaatgagtttagctccaccactttcagcttctcggcaaaaacccacaaatcatgcaaataattctcgaccaaaggcaccatcttattttctaaggatccagacgcggcttccatccgatgttcattaaaccacccggaaatgtttttgatgatcgcatcaagcattggtattaacgagtatttccttgcgtttttaaacacattgttcaaagattccacacaattgcttgtgtctaagttgtatctttctccgggaaaacaacaccttgtccatttttctttcacggttgtatcctctaaatacttggtcgccttaggatatctcaacttaaacccgtcatacgctcggttgaagtccgccacgacgtagacccgacttaacttctgaaacttccatgcgagtacgtctcggttggtgtgagtagcatgacctttcacattttgggacaaatgccaaatacaatacccgtgatgagcggcggtatacacgttctgtatggcctttatgaggcttgcatttctccgtcatgaaaaccaattctgaagtatcgggtacaaccgtttttagcttctcgaaaaaccactcccaactagcatcattctcaccgtcgagtacggcaaacgctatgatgtaatggtgacggttaggatcttgagccgacgcaaacactagcactccgccatatccgttcttcaaatgtgttacatccacaattaaaactttcctcatcactctaaaaccttcaatgctagctcccaaagctacgaatacgtactgaaatttatcattcttatccaatttcagataagtaattgtaccatcatttaccttcttcaacatgtatagataacaattgatatccttgtagctttcttccgggctaccttttaaatcataaatcgcatgatatttcccccttagcgctgtcgagtatgatactttcatacctaatttcgtctgaactagctccatgataattcttggaaccggagtttccaactgtcccggaaaatgatcatgaaggagagctgcgactaattgtgggttgccttttcttttcctgagcctactactacttttacttagccgagtgcaactatgcatcttattgtaccttctaatcgagaatatatcagtattactgatattggacgctcgtaaacgccaagaacagctctctttggcacactttaggacatagcgctccttatccgacttcttaatcacataaccaaaactgttagcaaatgcagctctatccaccacctcgtgcaatgccgccttgtttggaaattcttgacgtaaggtcaacccaattccgtcttcccattctttttaaacatacccggttctacagcaggtggcgactcaacatactgttcccccctatcagaattatccatagactcatcatagcgtgttttatcttcttgagtcccgtgatcctccactattgcctcaagttgatgttgagtcctgtgatcctccactattgcctcaagttgatgttgagttctttgttcctcttctaataagacgatgagtgcaccatcatccactctcatttcatcctcctctgaattcaactccgtatagttcttaccaacagaacttttaccaactctagacaattgctcgagcaattgctccggctcgggcggtttagagatctcctccacaaccaaaacacttttccgattattttttgcggatgttacataaacaaagacatcctcatcatcacaaacgttcatttcttcctctactccgaacaaccgtggattgtacctcatatgcaattttaccttatttgcatctaatccaagcttcgtcattatcctatcttctaacattgagaaagtaatcttctcccctaatgtcttcatcatcacattatacatgcgaccttggaatttaaaatatatgatcacgttctctttcattgtaacctgccaaaacaatacacatactcagtcaatattactagtattaccgattctagtacattttcagtaatactagtactaattctgaaatattacatgtgtgagtaatactattacatatatgaaatactacgtgtctaagtaatactggtgctattaaaacatattatctatataaataacggtactactatagctagttcgaccagtattattttcgcgacaagaacaaatattcgatttgagttcaatttagtatgaatcagcatgtgaaatcaattgcttacccattaacagaccaaatgaagcctaaatctatacttaaacttctaatgtaggtgctaaaacacaataacccaaatctaattggattgaatctcaaaatcttcaaaatatgtaattcaaagcttttgaagctctctccatacctggacttagtagattgatgcagcttgcaggaggagaaaaacgacaatgcggctcgccggagctcgccggaggaagaagcccgaagaagaaaacgagctcgcgctcgaggttcgtttttttttttgttttcagtttttgttttttttttcaaaatgttttcagaatattaattattcattcaaaataaaatataggggtaaattcgtcttaacacaattcattaactcaaagttgatatgaagactctaaagtggttttgcagattatttgttccacaaaggggacacaagagatgatcactctccaaaatcgctaatcttcagaaataaaaaacaattagtttccttctgaaataacttcggttatactttggttaaccgaaccgaaccgaaaattgtgaagaaccgaaattactcatgagagatgagttaggttttgtgaaatggtctggaaccaaaccaagtcacactctctcagtctcacctagtctagaaagaaaccgaagtagcaacactcacgtgggcgaagtttttgtgtggacaaacaacaatattggatatgcagacgtttgcttcggaagtgtttgtttcatgcttgcccatttttgccttcaaaagatgacaattaacacaaccaaaaataaacaatatgacaatggaagtagttgaacaaagatgccgatacatacgcccccattttattttgtcatttttagataaccatcttctttttgttatctataacacaattatcaattagttaggacttatgagtcataattagtactttttcatcaaaatttagtcttatctttcccaaaaaaatctaaatttagtcttaattattaagggcatcttcaaccctactatattttagagtaaaaattctaaattattctccaaccctactctatattaaactttaaaatagagatttatctataattgctctctatatatagagtaactctattctttattctattttagagttgaatttttttatttatactttgatccacaaatttaaactttttatttaatacttattatcatttcacgaacaacaattacaacatatagttttataaaaattaacaagcaaagaaatactaaaattaaaataaacaacataagaaaactaaaacataaaactagtaatttaatattctggtaaattggttgtagatccgccaagataattaaaatattgtccaaatgaagtagatggaggaagagtttcttgatcttgatattgttgttggacacatcatttttgtaaaatctgtgcttgttcagtctcaaaatatgttcgaacatttgggttttgaaagaaattcaaatcataaaatattttttttttcttcttttatttgatcatatgtgggaaaaatactctaatggtgttgtttaaaataaaatttgtaatgttttattattgtcatatgatgtaatgttttttatatataattagtgtttaatttaaataatatcatattgtatgagaattttgcaaaactataatatatatgatcaaattgtaaattatataattaaaaagtactagtatataaaatataaatataatattgttaagaatattcttttttatagtagaaaatagaaaaatacattagaattaccctattttatagtaagatatagagctacaaattggagatggtctaacccaacaaaattagtgttactttagtagttctttatttatttcacatggctaattattttcttatagttcattaaagagtactttattttgttaaactttaattaaagagtactttatttttgtaattaatatatatgaactggaaaataattagccataaagatcatatgatccaatctatgccattaaaatgctctgacaggttccgacttgtttctcttgtcaacgcccaaattcgactttttttttgtttcccttaacaaaccaaatttcactgtttcattcttttacgcgtcgagagtctcctccatgagaagcaaattctcagcttcttccgatgatctagcttcacttagatctcatgtaagtttgtttatctcccgatctgattttctgtctctctaacgttgttgttgattgatcatgagattttgcatttacccaattcgtttcaggaactgatttggcgagtttgatgataaagtttgtatttttctttgtgggttgatttcaaattgtgagaaagattcaagattttttgtcgtctcaatgatgcagcagcaagatcgaattggtgatgaaacagatcttgagtctttcacaagtagtgttcctagtagagacgcttctcataggtttagttctcatcagttctcaggaatggttagacaaagagcttatatatttgatggtgatggtaaatactataacaaagaatgggatcttgctgaaggaacagggaaagagttttgttggtatcatgttgaattacctaaaggaaatcagaagctttctcaatctgctcagcatttgattgatgctttatgcccaccattgaagcttcaggacattcttgctcttgctagtaatggacccttttgtgggcatgttgatggagcgcttgtctttagagttaattctcctggtcctgcttctagtagtaatacgtttaagattgctgcgaggattactgagaactctgtgatcactgtttctttaggacgagttcctaggttaggtttctcgcctatgggtcaatcgcttctctcggaagttcctagtgtgattgaggagcatgttcttgagttcttgttgaaaatgaaccattctgaggaagctgataaccctgtgccaacttctgtttcgaatcttgttgtgcatattattgacacacatgttgatcgacttcaagatgttgttactgaacttgagatcgaattggatggggtggagctagaaatggatagaggttagctagcactctcttcttcaaaagctctatatttgtcactaaaaccttaaatgactcggatttaaacatgcatttgccattgttttgtgcaccatttgattatttcttttcaagtctatgaacatttgcagctttatttcagaaggttttgtatagttgtttttttggctttatatgtatcatcattattgacaataggtggatttgctatgaagaaaaagatgttggatgatagaaggttcccgaaattgcatctcaacttgcagcgtctattgcaggtagagctatcactactaagccttaagctttcttcagaacattgttgttcgtgatttcatatctttgcagcaacatttttgttcttttaagaacatcctggtttgtgatttaaaagactctggcttcattttgtgtttctactcttagttaaacatttgcacgaatctcaggtgattgcgcatggagaacaagtatttccaagagtgaaagaaaaatgttccacgaagccttggtttctggcagaagacatccactcgttggaagagttgattgggaggttaagacgtttaaaagagaatgtaggcttcattgcgaaccgtgtgactgcaatccaagctgggttggatagctggcaagccgaacaaatcaaccgaaagctctattacctctcctttctttccatcatattccttcctctatcaattataaccggaggtaaaccaaagcacccaaaaccaattctctgtttccatttcgtcacggaagtagtatcttaacctgttgttgttaatgtggctaaatggccagtttttgggatgaatgttggaggagtaccttggacgggacaagacaaaccggagctaagagacggattcagaaatgtgatgtacatctgtttgataatgctggttctagtgttgtgctgcttcggctttccagcgttatatagtcgcatagcgtcttggtggggaacgagagatatgaaaagaagttggtctcttaacagaagatcgtttaagaagataccaaacatagtccaagaaagaaaaggctaccttaggctctaaaccaaacacacttctctctgagtacttcatttactttcttttcacctttcttcatttgcagagacatatatacttctgtcatactcttatggaactttggtttcacatgtattgttgcttagatcttgagtaagactacaatgtacagctgctattcttttaattcttggttctttttcatttagagagactcttgtaagagacaattgtgtatccttttttgagaaaggcaacaagagattgaatggagattgtaagtggagatctttcgaaatatcgaatgcttgttttgttttttctctcttaaagctttaacgctctcaaattgacttaaaggggaaattaggggcatattaggggattcttagattgtaaatgattaaatttaaatgttaattgagcaatttagtttagaggtgctctaagctatgagatgctcttaagcaaaacgcggtggtgacgtgacatgatttggttggttgggagaataatattaatcaagctcttatttgggataaggtaaaaataagaaatattatgcgagcatgtataatacttcacaatatgatcgtaggagacgaacgagatgggtacactcaatttgatgtctctgaattcgtacaaccggaatcaactagaagttcataagttgattttacctattctacagatatgtcttcaaatctcgagaatatgttggaaacttgaactcgaattcgtaatcgacatgcaaatcattaattgaaatctgatttggttgaaacatatatgaaaaatatttggcataaatcaatagttaaattttatgtttcatgtatgttttttttatgtcatcagtgtatcaaatattatgaattcaataatgattaagtttttttttgttttttggtcagaaaacatttttttgttataaaatgttactctccatcaaatgaggaattggttataaacgaagaatacaaagccatcaaggctaataaaaacgctgcaacagacgccaagcgaacgacacaaaaacagtagataaatggataggacgaagcaatcctagcaatcgagcaaacaacatcatcatagagcctatcttagattgtaaatgattaaatttaaatgttaattgagcaatttagtttagaggtgctctaagatagaaggtgcttttaagcaaaacgcggtggtgacgtgacatgatttggttggttaaaagatatgcagatcattaaatcacctagcatctaaatagcaagcaaataagaacatggatcatcaggttctctcttttccaactgccacaagaaatcacgaacagctagtcagatttattacattaattgtttttgttctttataatatgttgaagtcgttttgaaaaataataagtctttagagacttagtctttgtaatttaaagggacaacctaaaaaatatattatcgtcatcttacttggatcaaggggtatgtatccgagattttgcaataatttgtttaagaaatttagttaattctagtgttaaatctttctcttttaggctattaagcatgagttcttcaagtgttaaccctataccaaatgattttgaagatatgagtaaaagttttgaaaacatcaaaactgaattgaaaacaatgaagtttgtggcgagcttgagaaatttgctattggtgatgaaggcgaattagttattgttgttttggatgccatttagacagaatacatgaactacataaactacataaactacaaggtaactttaatcaaaattaatctatatcgataaaaaaaatatatctataatctgtgtcgtagatgtacttgatttgtagtatattgaataatatagaatataaaacaaagtagatatttcagttagaattttaatttgagttttttggtttagataaaaaatttcaaatatatagtatattttcatttgcttactttacttatctttttaaattgcataggcatgaaagatttctaaatatgttcatttggtacttagcttaacttagattagattgatgtccaacgttgcatctcaactgccaaattttaatttatttttctgttttcttagattttgtgtgtttttggttcaatctttatattttattttcaaattgtgttatgaaaccaaaaactaaaaaagtattcgtatatggaatacaatgtctgtatacatttgattttagttaaataagtttttaaaattccatgaactcattttttaaggataataaatatgaatactctcaatataaaatagacttgttttagaactatgagagttgtcaaatactatatgaattgaaaatttgtatgttagcgttattttttaaaacatcaaaaagagcatgacactagtggtaaactatagatatgtactcttcaccatagcaacctattgtataatattgttttctatcaatttggtcgtcagtctaaagcacatacatgttgaaaatataactctgttttttgttttgtctagaaaaaatatctttgctcgtataactatttttatcgatgatttttaatatttattttacgatcaattcataaaaataattaatgaatgtaaaatgaattgactataaatgatcaagagttgagtttttggccatcaaaacatgcattataaatgttcacatgttgatctttcattttagagttaacctcgtttaattaaaaatatacatattttgtttattttattattgtatgacatgacgcttaaactaaaggaggtgaatacaatgatttactcccaaatattaatcttgatcaatgtagggatattgacacagataaacaaaatgttttttcgaaaaatagccccatattttgaaacttctataaatatcaccccagagtttttaattggatattaataaataattaaaatgaaaactagaaaatagaaaccctaattctaattcttcttcgactcgacgattctcgatctccactttgacgatcgtcagaaaattcgatcgcctcggccagaatcttgttaccatttcatgcatgtatgattcctcgactcaacccaatcgacccaatccaatcgacttaacccaatctcgattccttgttgtttccccttcttcaacctaattgactcaatgtaagcttggctccgcggatcctcctcgattcctcgctgaaacttagttaaaatttaaagactaatctaaaaacatttctcaacaaaaaaaagacgataaaaattgtaatatgttgccttctcctcaaaagaggtgagaccaaactattttttgatcatggattggtgtaaaaggtcccgttaacttcctacgataacccatcttgacctaccaatggaaaagaaagcacaggttgcaccaaaattagcgaaatggtacatacaaaatttaatgggaggtttatacaaaacaaaaattaataattgctggtttttggatgctgatcgattgacaacttccatatgaccaatatgtttgaatgattttgtaagcttgaattggtttagaatcataccatagttttttagaataacgattaaatttaacatcaagtaatttataaataaaactgaatagagcttctctactaggcacgactatcgaggcggctctcccgttattgtattccgacgttggcatagattttgctccggtgtcaggattttttttgttgaacagaatatgttgtattttgcaaataaaaaagaaaaaagaagaatatgttgtacatttctttgtctaattaataattttagaaaaagaagcaaaaataaataaaaacaattttttgaatattttgttggttaatgctttgtcaatacttgttaacgctagtcaatatcggattacctgaataaaatgttcgtgatgttgaccacatgtcatcatatagttgatatatgtgggcatgtaatatatttagttcgtgtagttggttgtgcatttttaaatttagcatgtgcgaccatatatttagttatacttcgtatagctgagtatattttttcctctaaattatcatcttcttcttttttgtgaaacaataatgtagattctactaacatcaaacttttgcccgggaaactatgattgttctgaaaattgtctcgaaattgagccaaataatcattactatttcactctgagaatttataaattatttggaagttgcttcccgaaaagttggaatttatatttgtgaagtcgactcccaatgtgactttgttttagccgggagatgtcattcggtgttatacggactagggtgatgctagaatttcttggtttcatgagagttctgcatggttaaagcctatgctcaaaggagtttacctcatggtttgttcccttttaagaatccatgtaacttttctctttctacatgatttactagtttttaaatgttgtgtatttgcttagtaaattcttttttgaacgtggtcttggcgatataggcttgaaaaactgaacctaattgtgcgtctattttattttttgaagttttatatccttactcattttttcaatcttccaacaaaacttggggtctagccgtctatgatctaggttctaggtttaagggtttagggaaattttgattgagtcattccttttactacatctcgagtcttgctaactaatcttaaacgataaaaatcacatttattaattacaaaaactcattacaaacattcaatttatttattaaaaaaaacacacacaaataaaacaaaagatagatggctcatgcagcctagcgagcttcaggggtatattcagtaccaaagttcgtgctgacttctgtatattggatagatccctttgactccatgttttgactcattcctctccttgagttttctgatgccaaacattcatttaattcgattacaacttgagacatggttggtcttccagttgaagaaggatttacacacgacattgctagttcaactgctctccagacagaaccagcatcataatctccactaaattttggatctataatgcttttgatgtctccttttgtaagcatcaccccaacccattcagctatatgtggtttttcacgactttggttgatcacatgttggtttgtgatgatctctaatagtacgattccaaagctataaacatcacttttctcgttcaaccaatttgttcgataatatctgcaaaatagtttctttataccattagaaaagcgaaaaaatgcaaaacaatattgtatgaattaagcgatgaaagacgagagccaataatattgatctccaaactaattaataaattaccaaactggtaagctacaaacatataacacttactctggatcaaggtacccaggagttccagcaacaactgtgtccacacgggtttctccttcaagaggaaaagatctcgaaagaccgaaatcagcaagcttggcctgaaaatgttcatccaacaatatatttgtggttttgacatctctatgtaccattggtggtttgcatccattatgcaagtattccagccctatatagtaaattttattttcatcaaggcttaagcaaagaacaagaggaaatcaagaaaatatgtatgtcaaaactcattaaaccttgcgcggactcggccactatctttagtctagttttccagtccaaaatagatacaccttggtttcctacagttaattcgagatacaaatatgaaaaaaaaaaaaaacaagaaacaaacgtgatattagtagaaactctttaattatacttacctaacatatgttctttaagatctcctttagccatgtactcgtagatgagagataaattttctccttcatcacaatatccaacgaggccaaccaaatttttatggtgaactctgagaaggagttctacctgaaagggtagaaagaatttcaactcaagatttaacaaatcacatcttattgaacattgatttttctacaaatttgtaatctaaaattgttgtataaagtacctctgctttgaattctttatacccttgagatgatgagggtgataacattttaacggctacttgttcagcatcattcacagttccatgatagaccattccaaaccctcctttaccaaggattttctcaaaattatttgtcatctttacaacttccgaataagtaaatcttctgtttttcgtcgttattgtcgggtctaatgatctagatgttctagaaactgatacatgcatagatgatgatggtaagacataagcaaaatattgagaattttcatatttatattgcgaatatgttgcaatgtttatatgaaatggataagttttcgtatataccttcattgcgtggtgtttttctttttctaaacaccaaaaaaagagctaatgcagatccaagaactactacaagtgcaattgataccacaaccaatactacaacattctttttcttggcacctccatttccgtctttgcttacacatgatccatccggacaattaagataaatatttccttcaagactgagggttactcgtgttatttcggataacttaacacatgtaattcttttatatattcatctaaatggtatgataaaataattactttaacttaagtcctttcttctggagaagggtttgaggaacagaaccactaagattattcccacttaagtttctgttaaattaccaagtcagaaaaataagaaagtcaaaggcaagcttgtaatggaggaaactaaatgaaaaaaaaaaacaatttttatcatctcaaaagagacttacatgactaagagtgattttaagccagcaagaaactcgggtactcctcctgtcaaattgttatttgacaagtccctaattaagcatttgtaaatacaaaatatgttatacgtaatatgtaatttttgtacctagagataacaaattgttttctctattctcagctgcgaactttaaaatacttacaaattttgcaggtgggttaggttttgaatggcagatgcaatgatccccgttaaatgacttgatgataggtttctacatatatgttcatgaaaattcatgtcatataaaaatcttttcaatgatgatgatatgatgtgagaagtaaaacgataatttaatgactgatcttacaaaaaagttattgtaggtggtgtggaaatatacgagttgttgcagtttaagccatcccacataaaccgtttaggaacacatggatctccttgccagctagttttactcactccataagtattttggatattcttgatagcaataactagaaataagttcataaacatgcatgatatataagaaatcagcacaaaacaaaaccaataattcatatagataatattttgaaatgacataccatcatcttgatttgtttccaattcggggaaatcgatcacggtgaaaacctcgagggcactacaaagcggaggaagagtagactttgacgtttttaataactctatgatgcattgccctccttcacatatttgtggtttaataaagtatatagttcctgtggcgaacgttttaggtctataccgttccaaggcaaggtttccattcaacatcatgtcgaattctcgggtttcattggcctgtagagtctgaatatcggcgaagtgcatgtaactataaaatttggccgtagaaggaatcaatgaccaggtgaagttgaagggcgcatttttacttatgggtgttgaggctgaagccattacaaattttggtggatcataaccatttgaactgttaacattgagatttgtagtcaattctgtccacgcatcctcatcaaagaacggataccaatgacgatcgttgacatcattcgggtacctgacacattaatttatgtattagaaacagatattacttattatgtacattgtaaccaaaactgaacttgattaatataaagacatgattgataccgtattattctccttgaagtgctgaaataattccgaaataagtatttcagcgagccactttgagtattgtaagtatcgtttataagtggtcgcagctctaagctattaataataggtatactctcgcctgtcttaataagacaaacctggagtaccttagatttggtactgtggatgatttcttctgtggtcactccgttcattaaatatacagctgtgttcacgtttgcccatagattaggaccaaggtaaaggtcaaactcgagttctttattaagaccatcgtagttaccatacacgaaactggctctgatcaggtagtttgtgccgagcgtgacgttcaaggtataacagtttcggactccttcggggaagtacctaagctgtaaaattggtttgttgtaggttgactccaattccttatcgattgtaccagttttaccgctctgcacgaaatcattgtccgttgtgtatgttaagtcggttgcagcatcgacgtaaggaggttcattgggggataacccacaatctaaactgatgaatcctagtaagaaatatgaattgtaacgtacataacaacgtaattaaatgtattaaaaacaaacaaaaaaatgtgtatgtagctagtagatatataccttcttgatttccagcttcaacgacatgtaaaagaccaaacgtgatgaagaataacacacataagagaattgcttgaggatgtgttttcatttttcttctttggtacaaccgtacaaaggagattgacatgtataaatacgtgtaacgcttttgagatttatatgcaatggacattagaggaaacaagttagcacgatgttatatttgcacgttcaacttgtgcaaaaaatagaactccatgaaaatgtacaaaccgtacatttaaaggaaattgacatgtacaaatacatagaaaactattgagagatatatatgcaatggacaatgggaaacaagttagcacgacgttatatttgcaagtttaacttgtgaaaaaaatagagtcagcgagctctcaaaccaatataagtaataataagtgtgttttgattaaaatttataacaaatacaaacatctaataatcgctccttgctcttttaaatgactagcttattgttgtggtcctgattctcgaatgccaactagcagagacggattagatagccaatcacctggtttagtgaattaaattcagaattaaccacaataaattttctcttacaatatgccttatacaatatttgaaaagtcagagagcgagaaaattatacttttcatatgtgtcaacgctaaatcattcttacaacatgtcagaaattacatcagctgccattactaaaaataaagtatttattactaaaataaatatatttcagagacttattacttatatagtaactaaagaaaatcttctacaattgtttcataaatcatactaaatatatttagtcagtgtcgatttcagatgttttgaatagttgattcggaatgcaagggtcgagaatgaaatttggtatcgtctgatttggaagggttatgagattatgagggatggtttgtgcttgaagataaatttatgaaattatgtgtcttcagattgtttggtttattgttctgctaattttactttgttatctaaaaattgtggatgcccatttgaacatggacggactaaatcataacccattgaaaaaatttcagtacggacagtccatatggatgcaagcagtcctaattggtagctctattaaaatgaacaagtattgaaagagaaacgcatttcctgagacctaggtcaaactatagacaccccttatttttgtataaataaaaggggggttattaacaaaatcgtgaaaccttcatttaacgtaaatggtgatacaaagcaagcttaaatactaagagagatagccaactatacacaagatatataaccgaagataaccgaactacattcaacatttaaaccggagagatataatctctagtatgatttatgggtttacattggccctagaatcgtatattgcttatcagatcgaaagttaggttgaaacgctaaacatatcagcgtattatgtgagatgagtaaggacattcatattgatgtaaaaaaactcttttctacttgctcattcttgaaaaaaaagatatagaataattgcttattcaatgtgacatgtaaaattgttcttcatggaaaaagtttcttgaatagaaaataagacatggctcgtatgatacgagtcgtatcaaaaaggaaaaagaaaataaaagacgtgggaatttggctttgctggcaacagaacactttcttttgctgcaagttaggggtgtaagatatataagttatctttatacatgcacgttaaaagttagaactggcttttggccgaccttagcgaggtagtcctctcgataatcttcctccaaactccttggctttatagcgtttttcctcttggctcacttcttcacgatttctacatgttttagttcaaaatctcgtgagatttgtcatttgtcatatgtcaaaagtcactaaaatagaacagagattaaaacaattcaaatgaccccaaaaggacctacaatcgaccatatagaaatgtaaaaaagcgagatgtagattaagctactaccatatcacgctatctagtacttgattatttacttatctagctcttctaaatatttcaataatgatcaatatctcatcttgaattcttattaaggggacatggacaagccttacaaggcaaacttccaccagctaaaagcttatcaatcatcatgtatcattttagcctttcacaaagaaatcaagtgattgttcacgtgagcgatataatatgtgttttctataaatcaccatgaataaaactcgatttaaaaaaaaatcgtgtatcttttagaaaacacatactaatatatgctaaaatgacagattacgaatgaatatatacagatttttagtaaatatctctttctgcttttcaattaagctcaaagtcctcattgatggactacaaccaataactaaggagacagttgttgattttccaggtggtagtgaagcccttattacgctggattacaagaatcttaagaaccattgtcttcacttcaataggctcactcatgaacagaaagattgtccggatttgatatttgaaaaagaaaagaatgcgggaaacaaatcatcagctttctcccaaagtttaaagacagcttctagaaacttttatacgccaagagataactttttagcccccagggaaaggtctgaaaagtctggcagctataacaaagcatatgaggataataatcgccattcaaggcagagtaataccttatccgttaggacttcaactcagagagattctgtcccccctacagataggcaccctcatagtagaaggtcagcagagagatctttcgacagagctcccagcagagatttggtctctcactacccgtcaagaagaagcagctatcacccaagaaactcccagcaacagtggagagaaaaacataagagtgattttgcatcccagtttgaactcactgattcctcaagaagaagacgtaccaccttggagaaaaatgtaaaaaatattggtcaacaatcatcatatccctttcaggccaaccctgctagctactagaagaaggctaagtccaatagaagttggatccccccctcagattatccctacaaaagaacaagttatgagtgaactacaagaagtcacagtccaatatataacatgtgcagaccctacagaaagtgcagctagaaagcaaagagtgctacaaggtgaggcaaggaatttaatggccaatacaactaacctaataattcaggcagcaacagtttctacttcctctacataaccaaacgaaataatcaatcaatataaagagagactcaatgtcatagaagaacaagttcaaaactcagtccccactggggaacacacaaagagaagaagaggcagaccaccttcaaaaaatggcactaaaccagcacccaaattacttggagttagcccaaaagtgaaaccttactactggataccctaagaaaactccacattagaggtgctctccacagaaagtcactaacctagcggacccaagtactgtcaatcgggacccagaagagaacctccctccctcaattggtccaattttcaaagctggttctactaaaccacgaatacctgctgccccaaagatcaaattgatccttgcaagcaaaaaaaaagatggtggatatttagaacccgccagcccctattctttaagaatggtaagctagaactgttgtgggctggggaatcctataacagttcgcagactcaggaatatccatagccagatatctcctgacatactattccttatagagactaagcataactctgaaattgtcctaaaaaactagaatggatggactatacctcatatgcgtttgagtctgcagtaactccgggagcaggggagtggctctttttaggaaaaacaagtggagttagaaattctcagctcttgtctacactacatcgataccaaaattacgacaaaggggaaaagcttctatgctacattcatgtatggagagccagacagaaccaaaagactacaaatttggacccaaatcaaagatcatgctgcttctagaagtgacctgtggatactgactggtgatttcaacgatatcattaacaacaccgaaaaaaagggaggaccaatcagataatagggctcctttgtagatctcagaacatttatatatatatgacctgaactacactagaaatttcctttcatggagaggtcatgatattctcacctggttaaatgcagacttgacagagcaatggccaatagcgcatggcctaaagcttacccttttggaagaagtgaatacttgcgttttaaagggtcagatcacagacccgtgggtgtatactttgaccctgttaaaaagagacaacaaggttaagcagttggtagtcactgcttggaactctgatccctccgacacagtggagaatataatcattacatgtagaatgataattatcaagtggaatagagaaaaacacaataacagccagtcaaagattttgtcaagtgattcaactacttcagaccaaatctccaatattaataacgaactgctactggcctatcaaactgatgaagagttttggaaacaaagaagtagacaactatggctagcccttggagataaaaaattcaggctatttccatgtagctactaaggggagaaaagctataaacaatatttcagtcctagaagatgataaaggagatactatttttgaagaggaaggaatagaaaaagaaatctcaacttactatcaatctctattcacttcccaacagggcgatagaaccaccactgttcaggaatctatttctccatgtatttccccagaggtgaatgcatcccttatccatgcacctactcaaaaagaaatgaagaatgcttgtttcgccatccatccggataaagcccctggacctgaaggtttctctgcaagcttctttcaagcaaattgggctacaatggggccacatatcataaaggaaatccaagctttcttctcctctgggatcctgccaagtaagatcaatcatacccacgtcagacttataccaaagattacaagcccaaagaaagttgttgattatagaccaatagccctatgttctgtttactacaagatcattgctaaactgatatccaaaaggctgcaactagtgctacaagggatcatttcagaaaatcagtcagcttttgttacaaagagggctatattagataatgtactaatcacacatgaaactctccactatcttaagacctctgatgcacaagtaaggtgctatatggcagtcgaaaccgatatgaacaaagcctacgatagaattgaatgggattttattcggctggttctagagagaatggggtttcatggccaatggattaactggataatgcaatgcattattacagtatcctactcttacctcttgaatggaactgcgaaaggattggtcatacctgaaagaggaatcaaacaagaggacccgctttccccctatatttttattctatgtggtgaagtcctctctggcctatgcaacaaagctcaacaaaaaggcaaattagaaggcatcagagtttctctaaacaagggctaaccacatactctttgcggatgacaccatgtttttctgcagatccgatccccaaagctgtaaagaattggtctccatccttcaaaaatatgaatcagcatcaggacaaaagatcaattcccaaaatttggctattaccttctaaaaaaaaaacatatgcggctaccaaagagagagttaaaagagatcttcaaattcatcttaaaggaggcaaaggaaaataccttgatttaccagaactctttggcatgaagaaaaaaggtttatttactagcattatcgacatgattaaacaaagagacctgaactggtcttccaaatttttatcatttgatgggaaaatggtcttgctaaaatcagctctttctacaacgccaacttacaccatgacgtgctttaagcttcccacctccttgtgtaagcgcatccaatcggctcagaccagattctgttgggatgccaatactaagagaaaaaaaatggcgtggaactcttggaaaagaatgacaaaatctgtgaaaaatgggggtttgggtttccaggacttacaaagtttcaatgatgctttgttggcgaatgtcagctggcgagttctcactaccctagactgtcttttgagccgagtgcttcttggtaaatactgtcaatcatcacactttctagatagtcaaacaccaaactctgcttcccatggttggcgtagcatttgtattgatagagacttattaaaaccccaccttggtaagctgttgggtaatggtggttccactccaatatggagagagccttggttgtccacaaaaacaccactttcaccaacgggacctgccacagaagctagtcaacttcttcgagtctcacacttattcacccagaaaccatggaatggaataaggagatgattcttcaaattctacccgaatatgaaagagacattcttctgttaagaccaagtaaaaacggaggactcgatcggtgggcatgacttcctacaccgaatggagtctactcaataaatcaagctactatgaagctctcaatattgaggaacagatcaccaccaattccggtaaccctgaaacctatgattagaaggcaaggctatggaattctaagtgtccacctaagatcaaactgtttctatggaaagcaatgcaaaatgtcttacctgttggagagaatctgaagtcctgagatatcctggaatcagctcgttgtatccattgtgaagctgaagaggaatcgatcctacacctcttcttcaattgtcaatttgcaaagaaattatggcaattggcccccttcaagaactcactaaacttggagcgaatctcaagcttcatatccggtttcgaagcctccaaattactaacatgcctccctccaatcgggcttggagaaggatttttggcaccatggattctttgggtgatttggacggcaaggaacaacaagatctttaatgatcttcatccttagccgcggacagtcctgacgcaagcaattactcaagccaaggactggtttttagcccatgagaagaaagtcgcgacccgattgaatatgcccccatcatcccgaaaccaaatagactatcaaacagtattttgtcataccgatgcagcctggaaggatgatcatctagcaggttttggctggatactcaaagaccaaaccgggaaaaggctccattccggcaccggtttagtagaacatgtcaattctcctctgcaagcggaagccctggctgttctccttgctctgaatcaaatccgccaactcgatttcagccatgttacttttgcttctgactcttctcaactcgtcaaagctatcaactcgaagcttcaattcaaggaactccacgggattcacttcgatatccttgatctatcttcatcttttacagtgtttaaagttcttatcatccctcgatcgcaaaacaatttagcagactctatggcaaagaaaacattaaatttttctgtaatgggcctcgcccaattttaatcagaaatgaattaccgttgcacaaaaagatatgctaaagtcaatttcaaaaaaaaaaatgttcaattaatttttcttttatgatttgatttttttaaaaatatttttagctttttgggcggatttggttttgtataccctcatgcatttaaatatccggatccaaatcttgtactttaaaattttaaggtatccgattgatatgcatccatagtcttaacgtctgtatgatgtaactttaagtctaattcgacaactatagctacaaaatctagaataaggctaattgaggcaaactttacatgtgaaaaatttctttcataatttatactttttttaatgggttttgtgcaaaacaaaactcaatatcgctaatttttataattttatcttttacttctaaaatatgtacataataattttataaaatctaaaattataggtaatataacattttttgctattgtcaagtttttaaaattttgataaataatataatcaaatcgaagttctcgagacgagaattcaactctactttaaaaatttaaaaaattcaaatgtctcaaatacatattacccgtaaagattattctgcattttttgaaataaaggataaagttcttaaatttggttgagattttttttttttgcacaaaatccgttttgtcatgaattgatgtcaaaacgcttgcaatgaatggcatcacaattatttttattttttttggataaaattaacttttatttaaattttgttttactacaaatatttcattttataaattttcagaataaataaaaattacagaaaaatccggagaaaaaatgagaattgtattaatgtatacgaattttactaagaattttactaagaattttactaagaatatataaatatttcatcacaatccaggatttatttatttttctattttgaattttataaataaaataattgtagtaaaacatgataaaaattacttttaattcaaaaaataaaaaattattgcaaaatcatttaaaaattcatacctaattcatttataaagggaacactaaattttcatatgaaatggtgagtacaaaactaaaaacattttaattttttgataccaaattgcacattttaattaatatgtgtatttttcttccatttaaaaaacaattagacaaatatagcatcaaaatatattagatttatagatatataagcagctgttttagttttgctacaatgtcttattgaattagaattttccaagcatcagttctatcacatcaatcacaaaacttctcttacatctccctataatccagattgctacactattcttagatctttaaatcttgcgtaaatgttacaaattccataaatctcgcattccctaaatcttgatgtcttaagatttttaaatctgatttcgaaatacactgcctcgatttcccaaattcgccactgtttctcgattccgtcaatttcactacaatttttcgattccccaaattcactacagtttctcgattccatcaatttccttacagttttcgagtccccaaattcgctacagttctttgaatccccaaatttcaagaaagtattctttaaccctgaatcttgctacaaaaatgagaatataattgttttgtttaccttgatgttcttgggtaattgcatgtactaatgattttgtgcaggatatactacgattggaagttgttgagccatggaaacgaggttcgggagattctctgtctcttaaaaataaattttatggcttttcccttaaaaataaatgtcatttttttgttgaatcgaaataagttttaaggcttgaaaaagaactatttacaaaaatagaaaattaatgagtggaatatctaaactatgaagactcattttttttatcctatgtctctgtaatatatgtttgtttttagtttttgctaaatttatgtttaagtggttggttaaattgtcttttatatatatatgagaaacagtaaaaaaaacttttggttatctataataacaataccaaaagcaaaactcgagaatacatataaaagaaatatagacttttgaaaacaaagctaagaaaaagatttataaatttaaaaccagaaatttcttaccaatagtaaccatttggtttcttaaaaattattggcttgaataaaatattttgaatactcacatctcttttaggtcggatatttgggatataaatcctataattgatttaggttaaaatgaaaaaaaagaaagaaacagactctactcaacaagtgtgtttttaagcaactccaatagagagttctctcaagaaatagtgggggattatgttgttaaaattaccaagaaataattgaaaatatcaatggatatgcccagaaaatgtgaaaatcagatttttactattgataattcaatattaggtaagtatgaaagagagaaaaattaaagtcataactgtccttcctactttttttaatttaccaaatatgccatgtatcaactattgttataatttcactatatatcaaatattttactatatttatataaatattattcagatatttaatatgttagcacgttatattcagtataacatgttattataattttatattgattatttcatattaattgatatgatacggtaaatggtttaatataatatatataaatttatcgtgatactatactagttaacatgttaatcaaatatttatttgtatttagcgcgatattatactaattaacatattaatcaaatagttatctacataaatgataaatattttatgcaatccaataataaataatgttgtaaattttggatgaatagtatcgtcaggtatatgataaattgtatcatgcctacaatattcataatcaataatgttgtaagacaatgacatatttgataaattaaataaaatagaaagaatatgataaccatatcataaatagttatctacataaatcataaatgttttatacaatctaatgataaatagtgttgtaaattttggatgaatagtgtcgtcaggtatatgatgaacaatatcatacctacaatatcgggtaataaataatattatgagacaatatcatatttgataaattaaatagaatagaaagaatattaaatggttttagtttttttctctttcatagttacctaatattaaacaatctatagtaaatatctatttttcaagtcttttagccatatgcattaatatagccaaaaataattctaaactaaaaatatgtatcgcgttttacaattgcgctgcaaaattacaaatctgccattgtcggtggatcttcactccaactcactcaagcttcaatcactcgactcgggccaagcaaattcactgatggatacacaaatcctccagggtaactagaggtgggtcatcagatctctagggtcttctcattcttcattcccagatccgtagaatagaaaatgtttggccgatctgcgattcgtggaggaggattccgtgcagagaatctaggtcaaaacgcacttaccttaatcggtaacataggcttctcactcttcgtcttcggagtactaatcttcaccataatcgccgcaacttacgaaccagaagatcctctcttccacccatctgacaaaatcacaactttcctcacttccacatcaaacgctacacttagatccgatgactccgttgttaaaaccggtgaagatttcatgctcgctaaccaaaccgcatttgcagagtttatcaacataaacgatgttgaagccagcaccaatgagactactacagaggaagagggtaacaagttggaatgtgatgtgaatactccaattgattgcaaagatcagcaagtgtttcatcttatgatgagagctactattgacaagtttaaagatattcacttttataagtttggtaagcctgttactggcgaagaaggtgtgaattcttgtgatatggcgtggcgttataggcctagagatgggaagagtgctgctttttataaggattataggaggtttgttgttgctaagtctgagaattgtagtgtgagtgttgttgggattggtgagtatcattcgggtttgaatgcgaggaagaggaagaagaatcagaaagctgggtttgagaaaactggtgggaagaaagatgatttctctttgcctgttgttggtgaacttgtgaatgattctcttcctatggttgagtctgatagtgtgtttaagactggcaagtatttggtttatgttggtggtggagataggtgtaagagtatgaatcattttctgtggagtttcttgtgtgctcttggggaagctcagtatttgaataggactctagtgatggatttgaccttgtgtttgtcttctatctatacttcgtctggtcagaatgaggaaggcaaggatttcaggttttactttgatttcgagcatttgaaagaagctgcttctgtgttggatgaagctcagttttgggctcagtgggggaaattgcgtaagaagagaagaaatagattgaaccttcatctcgtggaggattttagggtcactcccatgaagctcgcggctgtcaaagatacgttgataatgaggaagtttggatctgtagaaccagacaattattggtacagggtttgtgaaggagatgcagaatctgttgttaaacgaccgtggcatctgttatggaaatcaagaaggttgatggaaatcgtctctgctattgcatcaaggttaaactgggactacgatgctgtacacattgagagaggagagaaagcaagaaacaaggaggtttggcctaatcttgaagcggatacttccccgagcgctctcttgtcgaccttgcaggacaaagttgaagaaggaaggcatctctacatcgcaacaaatgaaggagaattatccttcttcaaccctttgaaagataagtacgccactcatttcctttacgactacaaagatctttgggatgagagcagtgagtggtattcagagactactaagcttaatggaggcaacccggtcgaatttgatggttacatgagagcatctgttgacacagaagtattcttgagagggaagaagcagattgaaacattcaacgatcttacaaacgattgtaaagatggagttgggacctgcaatgctgcaacttcctgatctctgtcatattcctcatttatttgttgtttgaatcgtcttgtaccacttgtttccagttttgtattgtagaatagctttgtattttccattactgttgttttgtctcagtgacttttagactaatatatgtcctagtttggttctatttctttggaatgcaaaatcttgggaagaagatgatattgatacacaaaaattgattcggtacagtattatttgatacaactaacaaaagtgatgccaagaaagaaaaatagtctcatcgcctttgtttaccactggtcttctccttcttaattggaattagagtgagcttcttcttgccggaggagtctgctatggcgtcagctttcttgagcagtgaaatggcaacttgatgctgtctttcgtttactgtcttctcatccatgaacggtttaacctcaaaggttcctctggtgaaatgtctagcaacctacaaaagacatttattattcctcggttgtgtcagaaaagctaatattcagacacagcctcatcaatgcaagcttctggctaaagcgaatcacgacagaggagtaagagtgtgctgaaggtacctttaagagaatccatactttcagggaactactgaggattgcaagccgcgtcctcttccccgtagtcaagaagcttgacatatgactgtccacccgcaatatgaatcttggccacgatttggggttttccaggtctcctcttttctccatctttgcctgaaatttttaggcaaaacatggaacaaaaaatcatcgaaaaggatgaagaaaattatgaagaacaacaatagtaggcaacaacgacaatcatttattcaagatgttcttcatttggttggaaagagaagtaacagaaaagaatcgagattataacactcacaagctgccgacaaatctcttgttcaattttggaaaaggtagtctccagtgcctccactctaccagttgcgtgacagcaagaacatggttcactgatcataaatgttacactcggccgaacctgtgaaaaaaatagattcactacaataagtataaatcgagggggcgtgctatgccaaaagaattaattagaagctctacagaaagagataaacatccacaagttgggactataccctttttcttgttatctccataagtccgtgtctagacagctctgatacttttaccagtgacctatctctctccacggctttcttaacctcttcataaacgagtctcttatttgctgaaacccaaaaataaaaaacaagagtatacaggacatccatcattcaagaaagggatttgcacatcgagaatatttgaatatgtgattggatgaataaaaatgacattctaactcacattcatctgccatgtcgatgaaatctaccacaatgataccgccaatatctctcagccgaatctcccttgcaatctgttacatgatcgcatcgagtattacttaataaatgcttttcaagatcagcatattgcaaaacttgagtagacttcaaggagaactacacaagacaagcaggcctcaaacagttactctttctccatgttaaaaatttcctacggcattcactagtcatcagataattcatacacccataaatatgctcgaatctgaccgcattacgctctatagaataattactagggcccttttcagaggcagaatttctgccgcaaaaggttggcaaatgaatatgcaatctagtagtcaaaatgtatcacatacttgtctggcagcagcaagattaacttctaaaatagctttctcctgtgaattaccctgaccaaacattccatgtcctccgttcacatcaatagagactaacgcctcagtttgttcaatcaccaaagaacctccattggaaagtggaactctgcaagaggcaaaatacaatttacatgaagatatatgttaaggaaaaggtgggttataactccggacagtgcagtgttagccccttcttaccttttactaagaataccttcgatttcctcctcaatttcatataaatcaaaaagagggatacccttatcatgcaattccactcgattacaaagatcaggtgccatatcctgcaggtagtgtgtgacctgtaaactaatactagttagtgaaataatttggatatacaatctgctctattgagtgggccattctagattacggtaaaagtttagttatctgcaagtgcaacagttggataactggagcttttacttgagcatttgaaaataacattcaagatatatgtaaatcaataaatgtagagggtaataaaatcgatgtttatgaaagggaaagtctccttcatttcttattatggaaaatagaattgagcaaaatgggggcaatgtacctcatggtatgtcctgggagagtcaaccaccatcttctcaacctggaaaaaaccaagatattactgtcacttgagaattcaacacatagaacctaaaggggccactggaggagaaatgtatggaaaatgagctaactaccttgtcattgaaatagtcctgcacaactgatagtgtttgacccattgctctatgtagcagcgctggaatggctccttccacaccttcatctgcagcaagggctgcagattttgcttcatctgtaatgttcttccaggttaaaagcagaccatctaagtctttctgcagttcttctagagaatggccagcagctacagtccttacagtcaggccaaaaccttgaggctgcaatgtttttgctataacttttaaccgggttctctcaactcccgaaatttttttcgagactccaattcgtttgcaacgagtcaatagtacctataaggataaactttatttcagaaaatagaataataagaaacaaatggaaaagagtaacgggataaaacatatctcatacccagaatctacttctcagcttcgggtaagcagtaagagttggacctttcgtaccgaggccctctttaacaacttgcacaataattttggttcctttccgaacttgaatccacttattatccttagacgacatcaccttagaagcttttgcaactgatgcgttcgaatcaagagaatctgcagagtgtcctctctccataggaatatggccattctcagatccaacttccacagcgccatggttaactacagttccattaactagtccagctagatgatctgagacatgatattcatcattttcatgctcatcgtcatcatcatgaaaagattccccagggtcatttgaatcaatgtctaataaactactggcttcaaagtcataggaagcatgttcgatttcatggggagctggaatgtcattcatagagaggatcggagaaccatcagctgcttgcttcttcgatccatcacaaaatggagggaatatgaatggttccctgtttgacttaatgtccatgaaagaatgtctagcacttccgatattcacaaatgcaccacccatatggggcacaaacttagtgattacgcccaggtaaacactatcacactgcacattggtcttaactggttccaacaataactcgaccagctttccaccttccaatacagcaatcctttgcaccgtacatatagaagaattgatcagtatcgtagtagcaatggattctgattggaaaaatccaccatctggtaagagagtctcagtcagctggtgattttgttcatcggtatttaagttattttcattgtcatcacagctttcaacatcttgttcgctatcagtctgcatattcctttcatgttgtaaggtaatagattcttgaatcaaccacggttcctcgataggctgatagttgtcagaaaataacgcacttaagtttgagttctctgacgaaaaggctgcaagctcatcacataagaaagattcagctcctacttgcttatcattcagatgtgttctcgggacttctatagcactatcggcggaagtgcattcatctgccaaaccactggaagcatttaagttttaaaacattttgcaaaggatgaaaagagactgaacaaggaggaaccaccgagattttaccttcgctttgagctggggtaacacagtttggaaaaaggtaagcatcatcaatccaagacccccatccgtaggattcttgtgattttgaggaaatactcatactcatccatgaatcccttataattatttttctgtcttgattgacagaggaaggaactgataacgaaaattgtggccctggtctccagatgacatccgatgaagatccatatccagcttttaacagataattatacctgaaatttacaccagaagcaatctgccaagcatattaagttaaaagcaaacacgacatctgaactcactttcaagaattgaggttggttccttttgttactacgactaaacgttcaaacgttttatgtaaattaagatacatctctacttatgttcgctacggcttaagtgaaacaaaagaatagattaccttgactttagcttcccattcattatcattttccgtaggatacattgagattgcgcagtctggctcccagctacctaatgtagaaggatctccagtaacgtagagatgttcattggctgccagatcagcttccacaatccaaacgacctcgcataatcctttgagacgactaggtggctgttctgagaatacagataacaaaaatctcagtggctgaaaatgcaaacaaagaaacttcacaagttgaggcatgactcaactgaaattccatgaaaagacaaactgagaacaccacaggaaagttaaaccatgatattctctgaaaacttttaagttttgtactcccaattaccttgttgtgcacttacaatagcagaccttggacgtaaacgagagaccccaaagcacaaggtaagcctaaacgtctttccacgctcaacatgagagaacatatatctgttgaacaacagagattccaagttagtccaaagtatcatttcctttggattcatgcatatatttttccctggtctataaaatgagtttcaggggagagcactgtgagatatgaactcaagaaactgagtacaaacaaatgtttcaatcccgttcagaacctaagaaacccacttccacaatagattcaaaaatcgaaagaagataagaacaggaattagaatcccacagacaaagtgtatgataaaatgcctcaatgaaagaacttacgaagaaagcggaaacccagaagaaacgagccacgaggcgcgtgaagaaacggaaaattgaggaagacgacgccatggaacttcagtaacatccatggtattgagttgctatgaagaagttcagcaatacacggagcggtgggacgaaacgagcggaattgaaagcgacagtttttgagctggtgaaaagagattcgaagcgaatagatgtggcaaaaagcagctcggatttctgaagaatgcttaggaattggtgaattggattccgggaaggtggagaagatagacgataacggaaggataatggtggctttggcgccttgcactgacacgtgcggtagatattgtctcacacgtgtgtagttttccaaagcccaacaacaactcatagttagatatgtggtctactttagacccattaattaaggtctaagcccaacgggagaattttgaaatgttcaaaatgatgatatcaattgtgattggtaagaagattatggcatttttagggggttataggctcgacagacttaaacgcagcggatgagaatgcgaatgttggagttttaaaaaaacgggtgaatactaataaaggttattacgtgattagaacgacaaatttctgattggtaaaacatttaagtagccatgtatgggaatgaagagaatatgtcacatggttcattgcatagtatgggcctctgaaagaagaatagccataataacagtgtagtccctttgtaatatggagtctatcatttgattttctaacatcatcaaagtttgttagatactaaccagaatatagtgtgtttctgacagactttgtttttatattggtaatgtattgacgagtagttacccgctagccacattgttggtacatatgcttctctatttcgattgttttatatagttttggtagaaggagcttggttctaacatatgctcttcaaggttgaagatttttatttcttaagagcaaatattttgaaattgttacattgttgtgtttgtatatgctttttgtattgaattcaacgagatattttgttatgtttttttagttttgtttccaaattttactcactatggcagctcaatgaattcagagtccatgtacaaatcttaaacattggtctttttcatactaaaagaaaaaattgtgccctttttatgctaataaatcttaaaactcttttaaattggcctttcttcatactaaaaaaatatttggacctattttcatgctaaaaaattcttataaatctttcaaaatgacactttttcatactaaaaaaattggacctttaaatttacccaaaataatttagatccagaaatattgctcccctttcacccccaatgagccggccctaactgtggaaagcttcaatatattctattttcagaatctacagcttaatcatgcgttatttgtacaatcaagacatgatataggtttcagaaacatgactcacgcccaatcatttgtggtctagtggtaagggaagctttagtgaagtgtaaaacacatttacttgcaagtgcatagaaacaatgtcttgtttctatttatttgtttaaatacattgattatatatatatatatatgatttagaggatctagaaagcacttcttcccaaataatttttctcatttgttctctagcatttcttttatataaatgacacaaagctcttgtactctaagtttatacatcaatcttgttttcatttacttgaaactttactaagaagaatcaagatataatagatgaataatattgttatataccttttagttgtcagatttttgatcttaataattgtcttattttgatgtctagaacatcccttgagacttggctgaaaaacttgatataatcagtgaactaaagccagatagaacgatcacttatcttcatattcgtcgagcaacatttgcagttttgagtaaaaataaaatatatatttcttctaagaatatcattttaatcaaaattgcagagtactgttggacggtctcaggttccgagaatattagtgacgcacgtcacatccacaccatcgatatggaatacacaccatattctggtcattatctgacatactttgctgttgtcacaatatcaaaagatacactctatattacaaaaggattacattactattatgtttattcttctttcgaaggcctacaatatatgcaatgaactatgagacataataaatattattaaatattttatttattttaccccgtaattaaaaaaggctataaaatgaagctatatgactccaaaacagaaattcaggtacttaggtcgtctaatatgatgctcctttggatatcgtaaacatttgtggttacattaccaaatgtgttgacttttataaagccatttttgaatgcactttgtaagaaaaatgtgacgattaatgtgtttttgtatgtctaaagaaatatctcattctccttctcaatcgataattgttttgcctaaaggcactatttgtgcgttaattgaacattttcataactttaaaataaaaattgaactaatatatgtgagacaagtgttttatagggttcttataggtatctcaaaatttctcatttaagaaatcttccttgctttcttccttcatttattattattttttattgtaaaaaactttattacgatatttctaatgaaggtgcttttatttccagagatggacactctttcatgatttttgtgatggtgctcttactaacaaattcaaattggtttttcgggaaaaaataaaagtttgattcatgttttgcgagtgaccaaaaacatctgaacacacatctttgtcttagcattattttttgtgaagaaaaatggaacacagtctccacttatcaagcaacacattccaaaggactataaatgttcctcactagctaagaatgtgacattttaaacagatctctcacaaatttacgatgaatttgtgaaatattatttacttcacaatgattttgcaaattaattgttttcttgtagtgatattcactctaagaaattaattgtagcaaaatgatttagcaaattaattgtctacgatccgttatccgcatcataagtaatattttacaaaggcaaatgttagtatagatcgtatcatttcaattatattgatttattttactctataaataaattaaatttaaatctatatattaaaataaattaaattttaaaaataatgaaagtccacaaatattcaaaactaaaataacaaattatccaaattaaataagaaaatatctaattctgcagcatgccgtggcaatagcacaagatatctcagatagtcaagcaagcatacgcatgggatactgttgtttgattcgaggtttcttgagaaagaatccaagtcatattgttctactgtgaaccaacatgtcgtagccttctcttcatagacaaccaacatgtcgtttcagcaacaatttgtagtaaaactgaaatataaagttacttctaatgaagtcttgaagatatttatggcaccaaagagctactaatggttgagcatcttttattcgttagtctcagcatcttcaatctcaccctcttcctcaactttggtaacttcttccttttctatcttctttttttcgatgaattcgatgagacctttgagcgcaatatcagtgttcttactcaccatgagctgctgcgcgacttcagcaggagttacactcacctcaaggacaagcttctcaatgggatcaaacaggacatggtcatcaattttgaggtacatagccacaagcttcttcaagacaaatggagtgcaatagtccatgagaatgtgaacatccattcttccgggcctcagcaatgccgggtcgagcttctccttgtaattggttgtgaaaattatgattctttcttctccacagctcgaccaaagaccgtctacaaagttcaatagaccagacaaagatatctgtccacaagaaagaagattcattaggttcaaaaacagagaggttaataaaattagaaacagaggaatcatttcaacttaccccaaggtcaggctttttttttttctttttgaccttatcatcttcttcatttttggtctggcgtctacgagacgaatcagtaccacaatcaatgtcttcaatgagaagaattgatctgttattggtggcggtgagaaccctccgcaactcagcatcatctttaacgctctgaatctggagatcatagatattgcagttcatgtgattagctatagcagccaccatagaggactttccagtacctggtggaccgtaaagaagatatccacgtttccaagcgcgtcccacgctcttgagaagtcttttcctttagaaaaagcatcaagatcgtcaatcatagtggtcttgagttgcggctcaatggctaaggtctcgaaggtcgtgtggtgctcgaagatggctgattcccatgatgaatctttttggttgtaagtatagattacgagatctttgcgatgtctcataatctttcaatatcttctcacgaaactccttcttacaagtgagatgaaagtacctaaaacatgaaccaatgtaagaacaacaaaaagattgaagattttagtcaatgataagagataagcaaaaactactttttctcgtaaggataacttttagtctcaagagagtgtagagtccactcaagatgaatcccttcaaactcatcaacgatctttgtgttgggagggattccgagatttggctcagccgttggattcttgagatcactcgaacccacgaggatttctcctgtggagagtccggcaagacgcgtttttaagtaaactttggccgcacggaaagtatgatcaatcacaaaagaaattcgactgaaagtaagaagagaacaagtctacaaatttcacagtgatgtaatctcggattttctgaggcacaatctcgttgatgatgttacggacaatgatcatgattgcagaaaaagatgtgtagatagcgaaaactgcggagacaacggtaacgatggtttatctctttctctgagaatggccattccatggttataactttggggaatttggaaacatcgcaacacaacggtactggcgggaacacaaggcgatttaaatgcacttatagctcatgcttttgaagaatctgaggtgtggaacaggttaaggatgatgccaacccagtctgtaactcgtctttcgttgcaacctagatgtgcagttagatggactaagccaccactagatacgcttaaatgtaatatacatgtttcttggctcaatgatgttcacatctgtggtggagcttggattgtcaggaatcatcatggggatgctgtttttcatgcgcgagaaatgtttttacgaacgtcaaatcgtattgatgcggagttgagaggggttttatgggtcttacacagtttatgtgacttacacttagataacattgagatatggtccgactgtggtgctgctatggaagccattagtgatcccataaattggccaacgtatttatcttatcttgatagaattcagcggcttcttccgaattttggtaagctcgtgtttaaggtttcatctacaaaagccaatacaatagcacgagatatagccacgagcgtaacgagagaaggtaggagcagatcctatttggctcgcggaagtccgatgtggttacactcacgtattgaagaggacaaacgaagttgaatttcttggtgtggttttgctatatgaagctctgtttttctataagtgtatgtatgagcattttgctctgttttttcttttttgagctgtaatgctatggtttgtagtactttttatcccatggttttaattaaaaatattcagacggcaaaaaatagatgtatacataatgaatggaaatcatagataaaattaatttcagaattttttcccattggaaagtgtcacgtactgtaaaaaatatatgaagttaaccaacaaaatttcccacacagtattccaatatcacactctttttcagaattacactcttcctctaatctttccatctcgtcaatccatggattcattctcaccgtgagccttcattttatttatctttttgtcaacaagattaaattaattaaaacggttcaaaatttaaattcggagatacaaaatttaaataaataacattattacatagactttaatgatgtttagcaaatagccacctttaattttaaattgcgttaaatcaagtaaaaaagaagaaactaaaattgttcaccgttacgaaagatctaacaagaatatcccggttcatgagagagggcgacggtgcgacggtcaggagctccatccctctaccttaagggcatctccaacgcagagagactgtgtcaatttctcaattatatttttttaatcagttaataataaatatattacttatttaaattttaaattataaagacaaaatctgaccaatcataaagaacaaaatattgaagtggatttctcattgtttctcatataagaaacgtatctccttatctctccacctttttcattactttttattttttaatcttcagatacttgttgagaaactcccgttggagatgacctaataatcaaaggacctattttaaaaagattttataaaataattaaacaagttagatagtatgttttattaatgtattattaataaggtcccacaaaattttgtatgttttataacaaactgtttttctaattttcacccaaaaaaaaaactttttgttagaataataatgttgagccggccctaagttattttttgttaaaaaagaaaaagttttagggcccaatttcgttttctctaggggctcataataatgttgaaccggccctaagttattttatcagctcactacttacgctatttggtgatacaacttgctataagttattttatatatgtagttggtcagatctttagtaaacaactttgagtaaaaaatcggaaataaaatctttctggataacaatttaaactaagaaatcattttctgtctaagttttataatttatatccactgcaattttttgaacttggttattgcagactggtttacaagagcttataacctagtattttattaaaatatcggttttagtatcaattgtcaatcaaactttagtaaattatgttaacaggttaaatcttgaatataaaaacttctgtattggtttttgccctctacattttagtgccacctaaacctagttacattatagtttcaaacattttcattagctagctctctcgttggaaagctttttttagagcgtttagcttaatggttaaaaaactttgtcctatagataatgtcggaccatgtggagtattcttacaaatacattacatatgaggaaaatgccaaattacaatttggtgtacacatcaaagaggaagaagacagaagtaaataatgaaaacaaaattttggaacatgaaagccacaggtcctgtgagggtccgatagaggacacatggccaacgtgaaaattactcaatacaacgtaactaagtgtgtcgtgacatgtttttttcagattgggaaaacgacaaaatcaatatcataacactttttttgttcgaatcaattccataactcttatgtcggttttttgtatgacatttttaaaattcaagtattagtttaagctagaataatatactactagtatttaattctggttcgtatcttgtgtgattgtctcatcgtatttatagaaactagcaatatatagctctccacgatacctactctaattatatagactcaaattcaaaacttaaacataataacaatttaaacgtgcatatttggttagaaaattttactgtcgcgatatagaagaatatctattagagtgaaagtggttttgatggcttcaaatttttgcatatgtagttaggtatgttgtgttttgtggtgtatacttttattgttatatcattatcatcatgttgttttgtgtaagtatttttaggataatataaactatacaaaactaatgaatgtggatatattaagagatattttgtgaagtagacactttttatacaaaaataatttgtaaagtaggtagatttttttaaaaatatagagaatagacacttctctctttcctctctaatacaactttctctataatagaaattttggtaaatgacctttataacattctcttgttttgtcatgtaattaagtaaagacaaaacttactttttctttttcttgtttttacttacacatacttagtttgttttgctataaagtttttcttaaataattactataaaaacatattaatctttaaaagatttctgtgaatctaaaaactctaattttgttatatatcataaatatgtaatattttcttttatttaatctcaacctcgtggtgtacgtgatattataaaaaagtggtgtacaaatagtagtgtatgtcaaaaatgaataatattggtctaaaaagtaatatacgtaatacgatatatgacaaagtataaagtggtgtacaaacgacaatatatagcggtgtacaacaacataatacaatggtgtacggagatgatgtaaagtatggtgtacataatattaatagtatatatgaaatgatgagataatgagtcataccatacatcacctcgtacaccgtacacaataccgtacactttcacctattttgtacaccccatatacaaaaaaatagaaccatttttgtcaagtgataatgtacaaaagaaagtttaaataatagtatacgagatttgtgtacataaaagtgtacaaatgttagtgtacactacgtaagaaagtactactttcatttaatggtatacactatcatggttaatttaatggtgtacatgatggtgtacaccatcatattaatataaatttatgaacaatcattactttaattaataaatatgagtcaaagtcggtgcacttaatgatttagtatatattggataaatattgttggataaaataatttgatgtataagtgttagtgtacaaaactatgtttaatgctggtgtacgagattgataattgaatatatagaaatcatcttgtttttggaagttaaaaaatattaataaaattaaaattaaaaaaagaaagatgaaaataactataatataatagttagtctaaatatttaaatactggaaaattaggaccacactaaaactttctcatataaagcaaagggtaaagtggtatttgacaaattttttgtcttttaccttattacacataaactctatctcacaaaaagtagaaaagtgtctatttcacaaatttctaaaaaaactacttatttctcaaattatttttaaaaaagtgtctactttattaagaagcccatatattaatatataatgtatataaattttgtacattggttgacgggttttaaaatttttgagcatgtattaggaagccgtattactttattaaaatcttagaatatatctagttttccgaacgatttgttctcgatccttaattccttaccataatttctcgtctcattaccttaatcagaagccatcttacctattgtcaatttggaataatttaaatactatatccacttgattaacaatttctcgagattatttttagggctaggcatacatatgggtaacccgtttgtgttcgggttaaatagataattgtaaatattcggttccggttcagtttggatatatctggattcggatcggtttggctaataagtctgagaaactgtaaatacccaaaaatctggattctctcggattcaagtctaaattggtaaaaattatccattatcccaaaatgtgtctccaatacccaaactttcaaaccaatttacatgcacaaaacaacaaaaaaataataatagaactttaaacttgacatccaaaatctaatccaaagtcataaagattaatacttagagttaagagtagagaaatatgaatatgaaaacaataaattcgattatccaaaaataaaaaacatagaactaaaacgagaagtaggattgtagtcttgatggaagttgatgaatgggtaattcaatcaagcatgcaaaaggtaagctagtgttaaccctataaatgtttaaaactatatctatatatcgtataaatacacatgtcttatatcgggtttatcggtaccatgtttgagtatcgagtaatctccgacccgaaccgatatccacaggtttaccaaaaccatacctaataaggtaacttcctattcgtctaatccgcttcaacccgattatttttatccgggtatcgatttcgatattgggtctgggttttttttgcagccctaattatttcattacaagtaaattaaaaatatatccacatccatctttgaaacaatatctcaatttcttaaacttaagcaactacatcaagatccaccgtgtttaaattgactttatattaaaaacaaaaagtttggtaaaattagtcttcagctaggataacaacaaaaatatatacttagggtacaagtgatagtttttgttagatggattaatatggtaaaccaaaatatttatatgcaatttgctaaaatttccctttttgcattgaaaatataaaaagaaatagcctttaattacctgaaaatggatttatttaaaagagaagtttttctgtgttgtgttgtatacaaatgaatcaaatcaaattattcagtaagtttccatatttcattcatctttattccattcatttttttcatattaaaagagaatacagtctctgtaatggtttccgatttttttccttaactaggttcttaatttgtttgaatcttattgtacttccaaaattaacaaaaacaattatatttgattttgtgtttctatgtttttgtttttggtctttaaaatctccaatattatttattggcctttttcatggtacgtagttgataacttgatacttaaatagactactaaagcaaaaatataatccctattttattggtttttagtttactttcgcttaaaaactgagacatatattggatacgaaaacaaaaggtaaaatattttcaaatattaaataaaaaatttagctgaaaatttacaaactataaataacataatatacctgaagccaaccatatgctaagaatatttacataaaataccttaaatcgaatataatctatatgggtaattatatccaaaaatatcacgaaatattatttcgttgatgatagactttaaaaattgcatattatgtacagaaatacaattaccgaacaggaataattttttgattacattgaccacataatataacaaaacactaatattgttttgataaatatttgatgttttaggaacaaaatacatgatgttttcaactttcaatataaaattaattaatatacttttttgggtttagaggtttctattctgtaaattgtatttttttttcctgtagattgtattactattggtcgattaaatggataataaattaattttagtttggaaataaaaacaaataaatgaatccttaaacatcaactataaaaagacagaggagtatctttaaagaaacttggattgtgatattgcactgtaaatagaacataaaatgttgcagtgtaactttattttaatcaaataaacaaatgttagtaaaaaaaaatatatatgttgcaaacaaggattaaattcactagtaaattctcattaacaaacaaacaaaaacaaaaacaaaaacaaagatagtgccaagcattacatatataaacaataaaaagaccctacttattaatatctttccttaaagaaacatggattattatcattttggcagtgtatgaagtaataaatataaacaaaatgaaataagaaaatgcaagcaagtacaattgatgatataaagtaaccatggttaatcaaaaaaacctgaaagactgaaatagagttaaccatagttaagcttctctggttaaaagataattgctttgctatatattaaacaacaattggaacctcctcttttatcaaaaccaactctctctacacactttttcagattccatcatcacttgttcttttcacacccaataaaaacttgcatctttcttctaaattgttgatgatcgcttctcatatttgaccctagaggttcgtacttttctctcttttcactaaagtttcgatttttttccccaatttttagccccagaattgattcagagtgaagagatttcaaattggtttcataaagtttgcatcttttagaggttttgatctgtgtttcttgatttagagtcagattttgtgtttggtacgaatcaaaggcttgagcttttggtttgatggttgtagaaattgaataaagatctgttcttgaatccttttgatactgattagtgttaatttgaattaaagctttgtgctttggtttcgatttgctaagctttagagttaatttctgtttctggatcataatatgagaccttcaagtctcttgcttgctcatactaatcatagattgtcattgaaatctatgtgctttggttggaatgtcttgaagttttcatatgttgtgagctaatagcccttaatggtgtttttcagacaacatcatttctaccgacaaagatttgatatcgaatccaacaagtgaaagatgggtctatcaagtcttcctggtccatcagaaggaatgttatgtgtgatattagttaatacagcattatcgatctccattgtcaaaggcattgtaagatcattccttggcatagtaggaatcagtctctcgccgtcttcatcctcgccttcttcggtgacggtatcttcagagaattcatcaacttcagagtcatttgatttccgggtctgccaaccagagagttaccttgaggagttcaggaaccggactccgacactgaggtttgagagcttgtgcaggtgcaagaaacaggcagacaatgagtgttctgtgtgtttgtcgaaattccaaggggattcagagatcaacaagctcaagtgcggccatttgtttcacaaaacatgcttggagaaatggatagactattggaacatcacttgcccattgtgtaggactcctcttgttgttgtgccagaagaccatcagctttcttctaatgtttggtgactgcttttcactgtataggttttttgtttgagtgtgtttgttgtgtacagctacttttactatgaattaggttgcatcgcggttgattctcgagcagatttaaaccggggatgggataatctgatgtacatatatatatatacccatgtgtatggagctcttgtttgaacacagttttcttgaatctatgtgtatgtgtgtggattaagagttcatgttcagtcttatgagcaactaagctaatcaaaaagtagtattttaatagttacatttttcgtaaccaaaaagaaacaaaatgcaagaaatagacaagacattagtatccataaacgacgttgttttgttcaaacagatcaaataaataagacattaacaccgtaaaaaatttttgttaacctatttaacgatatgactcaaatggcaagtcaacaaaaactttgtcatttgtttccaaagtcaacaaaaactttacgatttatttgtcttacgtgaagttcaagattaaatcatcccaaatttgaaagttcgtgatttttttgacatttttccccattaggaatcagcttgtagtattgtcaggtggtggaagatctagatttcaaggcgaaaattcgaaaagaaaacgccataaatttcgtagcgaatacttgtttcggggtgtaaaaaagaaaagtaaaattagataaagaaaatataatgttattcaaagagtagaaaaatgtgtataccattgagattttaggtgttgtgagtaactgatatgatatataaccaagaaagtaaataattaaattaggataaatgtgataggaacagaattatgtaatactccctccgtttttatttagatgatgttttaggagaatacacacagattaagaaatcatttaatcctactatattatttgggaagtacattttaaatataaccttattttttgtaagtaattacataggtatgccattagaaataaaattttaaaagtaaattaattcatctctttaaaaattaaaaagtcaaatactaatttaattaattaaatttaattaaaaaacgaaatacattattaatttctaaaaaagtaaccaattaaaatcaactaattagatttgatatccaaattatcatattaattttttattaattttatagtacacctctcatctttatatgattctatttttacgaaaaaataatatcatcgttataaaacaataattagagttttttcgcatatgccataatttgaatttttaaaaacgaatataaactgttcaatacataaaaaaaatattataacgggtcaaaaatagatttaagaaaattttatactgagtacttagtcacaatttgaatatttatattcaatttcatacatattattttaaaattttataatcttatatactacaataattaataacatattagatttttttatgtgtatgatgtgattcaatttttaatacaagctggaaaatcctagaattgacgggtttaaatcgatattactacaagatggtatactacaggtgaaactctaaaattaacaatcaaaatacaagtgtataattttaaacactaaacaatataaataatatcaacaaaatatatacaactcgcagtttactgtacatttaaaatcaaataaaataatatcatatatttataatcatctttacaataaaagtttttagtttaactaaaatataagcctacatgcggtatactacaagttgaaattataaataagcagattactttcacgatgtctgtaccttctcacatacacacctatcaaaaagttaaaacctttcaaaacctcttggtatattcaaattaggattcttcattcatggaattattattccaaaggttttgtgatgtcttatgaaatgattttggaagaagaggatgtaaattttttttttaaaaaggtagtcagcaaaacatatgtttttttgagagtttttagataattaaatcacagaatagagttgggcatatgagtaacccattcgagttcgggtttgggattaatgggtatatgatttactacccaatagaataattctaaatattcggttctggttccggtcagatccagttgggtttgggtcagtttggaaaaagtttcagaccctaaaaatatccaaaaaaaatagaaacgggaaatttttatgtagatagcgggtctctaaacaaaaaaaacttttaaatttgttaagttttaataaatttaattatatttgaatatattttactaaattttgacaaacataacaaataatttttgaatagtttagttgtttgggatatttaggtccaaaattaattgacatatttagatttatatttataatcttagataattagataatattacgattaaatataattaatattttggatattaaattaatgtttgagtttttgaatattctttttgggtaacggataatttccagaccaatcggatatccacgggtttactaaaactctacctaataaggaaattttctaaaattttaacccgccctaacccagttttttggtttgggtattaggttggttatcgggtccgttttttcgtcagccctatcaaagataatctaatttagaccccaattaggtctataaatgtaaccaaaatactatagaaagactaattctaagttaggccaaaaattagatcctctaatacaaagaaaacatgtttcttacaaaaacaattatatacaaattttacacatttacttaaaactacatatgttgtatttattataaaaataacatttttaaacaaagtcaatccaatgtagcattatatgcaaatagtaaaaatattgaaaaatattatgacatcattttatactatactatttcttatataattcaaacaaaatatacaatttaatttatacaaaatattaatgtccgtgctgtatagcacgggttatgatctagtttttgtttatttccaaaactaaaacatcatttattatttaatcaaccaatagaaaaataatctgtacaataaattttgcatttaaaatttaaaacatcatctatttaagaacaaaaataaaagcttagaacatgatttataaaagaacagagagaatatcaattagatagatttaatgtaagctattgtagtctcttaattgataattatgtttttcacaatttaagagaaacaacaatgcaagaaagagaaacaacaatacttgaactccacatttagtggtgaggtggtggaggatccgggtctcaaggcgtaaatctatcgagaatccgtcctaaatgttgtagaaaatcttggtttcagagcgtaaaaaagagagtaaaattagataaagagaatatagtgtcattcaaagaatctatacatctttgaaaatttaggtgttcggtgtaactgatctgatatatgaccaagaaagtaaatatttaaagaatgtgtatactcttaaaattatttatgtgtaactcatataatttttgaccaagaaagtaatagatttgtgacttatcgtataaattgggaaatatatgataggaacataattatgaatatcaatactgaaaattacccacattgactcaaaactgggcaataataactaaaatgattctcattagtgatggataactagagtaacacaaattttgtgtaagaagaccaattgaccctagatgtcgacatttaatgttttagtggtaaatatggtaactgctctaataagtctgtcattacaaaaaaaaaaaactgtcaccactgtaaatattattatagcaaaagaatatgcaaaaaaaaacataattgatttttgaagttacagatttttttatatatttgggttgactatgtatatttacggaatagtttttagttgtaaggtttagtgtttaggatgtagaaattagttttgaatattaaatttaattttagatttgtggtatttttaaaaaataaaattcattatagtattttttttggaaaaacttattttagtggtatttaaaagaatttctaaaaacaattgacaaaaaaatcaaatctgtcataatatgattttccaaataaaaaaactgttacaatacttagtattattctattaaaaaatcatggaaaaagaaaactataaatcggtcgccataaggatttcaaattacaaatctgtcgtaatataaaatatttttagggtcattccagcaatttattttattttttattaaacctgctatcaaacgacagatttatggtaatataaatttatctgtcacaacataaaacaatctgtcataacacaaaacattatattttagaaaacaaagatgtcatcaaacgacagatatcgtgtaaaattacaagaatctgttataacataaaacaagtctgtcataacattaaaaaaattgattatcgttagacgtcattctagtaattaattttttgacaacaaatctgttacaatgtgacagatttttttaacaaaattataaatttgccatcatttaacgtaaaaaaacatccacaaaaaaaataagtctgtcaaattatatgaaagtctgtggttgaataaactaaaaatctgtcaatcaaattaaatctgctataatttataaatctgttatcactatcttctaagaagtctgtcaaccaaaaaagtctgccataaaaaatctatcacagttaaaaaaagtctggggaataagaataaatctctcataactaaacgatagacttttttaaaattgctggaagtttttttaaagggtatttttgtatttattttatttttaacacatgggaaaagggtattttagacaagaaaagaactaatttaaccctaatattttataagacattctaataattaatctcattatttgggttaatctagttttttcccatatcaataaggtaccaaaatccagatagaatcaatgtaaattattcaaagagtaatcgtttaatagttacattcttcttaataaaaaagaaacaaaaatacaagaaagagagttatttcgaatccgcttatagcggttaggtggtggaggatccggatctcaggacataaatcagtagataatccgccctaaatttcaaagagaatcctggttttggaacataaaaaaaaagaagaagagcaaattggataaagagaaaaatagtaagatattgtgtaaacctctgaggtctgaggtctgaggtctgaggtgctgtgtgtaactgatatgatatttgaccatcaaagtaactatttagtgatttgtcttacaaattgggaaagataatatcaataaggtaccaaaatccggatcgattcaatacaagctattcgaaaagtagtctcttaatagttatattcttcttgataaaaagacagacaaaaatgcaagaaagagagttatttggaatccatttataatggtgaggtggtgaatgatccagatcttaagacataaattcgtaaataatcaaccttatatttcgtaaagaatcctagtttcaaggcataaaaaatgagaaaattagataaagaatatagtatcattcaaagagtggaagaatgtgtataactttgagattttgaggttttgtgtgtaatgataaaatatttgacctaagaaagtgtaactattcaatgaattctctcactaatttagaaatatatgataaaaacataattatgtaatagtatcaatatggtaccaaaataaagagagatttcatgtaagttatttgaaatgtagtctcttaatagtcacattctttttatttttattttatatataaaatagttacattcttcttaataaaaaaggaaacaaaaatgcaaaaaagagatttatttggaatccacttatggtggtaacgtgggggaggatccaggtctcaagaaataaatttgtcgaaaattcgccctaaattttgtaaagaatcctggtttcaggacgtaaaagaaaaggaagagagtaaattatattaaaaggagtataatgtatacatttgagattctacaattcataattggtttcttaagatactaaatggtgatatcatttattttgaagaaaatgataagcaggtcttatgacaacaactctgaccacataagtagaaaaactattacaggtacaaatactattttaactctctagaactacttacttatgtatttatgttattgactgactcttttttttatattattgttgtgtgtaagtgatatgatattttcacgaaaaaagtaattgtataatgacttgtcttacaaattgagaaatatatgtaaggacattaatacatatttatcaatgtagaaaataaagtaagtaaacccataaccaaaatccagaataggttcaatgtaaggtattaaaaaagataggataagagcggcctacaccattttcatctatttacagatgtcgcctaatttaccatctagattttggggttattggtgtcgtatagcaaatggtttgtcaattgataaatagccaatacttttgaattttgatacataaattaacgcaaacaaagaaacagtccaagttatatgagagcaaaacatttataggtactctactactcttgcactaagagccaagacgaggaagactggttaacgtattcaccaacatatacaaaacccaaaaactaaacctgttggttaaaagattaaaaatggcaaaaggtactactgtagtagtagcccttgtgccatatttacaaaaccaaaccagtaaaaaatgttaaagagtgttacgaaatgagacatcatctcttttctgattgcaacgctttggaaatgcaacgacagagtctcaatatccgaggatatcccactccaacatcatcaattgtagattctatctccttcttcagttgtttcgacacaacaccgtctctttttgtgcctgaaactttacggaactcgcaaggaactacatcactaggatatttcccactgttacaatagagaacacagtttcattatcggaaagttataagaacttgattagttactgagctgcttagatacttactggatcaaacatgtcacatcgagaatcacgcttagttttctcaagtttgtgcaatcaagaaagctaatctgcaaatgtagctgctccgctgcaatcaacaagacactagtgttcctatctcagacagaactagtcattaaaggatttctaaattgcgcatttattggccactactgttagactagtttgacccaaagagaagtgagaggaggaaaatagatcacctgatggagaatcaaagtttccttggaccaaatttggtatattcatttgagctaaatgaaattcctcagccacatctagcagattgtgtaggagcaaactggttttctgtatcctcggagcagaatgagaaaaacttcagaggtctagtcttgcacaaaataaatccagagaaagtgattctgctaaaggaacttacaaacactaaggagaaactagaaagcgaacatgacttgcaacaaaattctcaacaagatagaaaaaatacctaagatgctatgatagtaataagagaaccacaggaacaaaaggagataattaagacataaacacacctgtgtaatttccaacaatgtattggaaccaccaatatacctccgggagtcttcagcgttaaacatagagttaaacgcaattgaaacattcatctctgggaaatgctgtagaacaatgtcttgattagaaacaaaaagaagatgatttattaatggaaggacgacagtttggttacccttaccttaacgaatgtatcactcaaactgtttgaaactagtacacatgaaggatggccaggctttagtgtgagcctgcatatccaaacaattgttcaataaagtccaaatagcgctcatgtatatgtagcaaagtgtaggaaacagattcttcaaaaaggttacggaaagattaaaccaagaggaccaacctttggttgaacacgccactatagtttagaacaatactctgacaatcgttccattcacctaaactgtcaactttccaaatctggcgacagcagaagggtaattcaagttaagaaaaacactttattttagatccccatgtctatagaaataagatggtttataccagaatatcctgacgtagggatctgcaactcattctctttttcaaggtctcttcagcaatcataatagtgtctgcatatgccggctgcggccctgtcatcgtgtcgcaagccgtaaaacattgaatcaagttcttgatttttgagtcaatttctttgatctcctgtgttatctctgctcgtttgccagttataataacctagaaaaatgttgacggataacgagtctattaattacttgggttaaaaccaaaatacactaaaatagcataagtgtaaacaaaaataagagaaagcatagcatacattacatctgatctaaaaaatatcatgagaccctgtgggcagaacattacatctgatatgtaaacaaatatttttttctgccattagagtgaaaaaagtcatcaacctgaaaatgttccatgcctaccaaaaaccatttatagcctgtgaaagagttaaggcgtcctaattattgaaacttggaagactagaccaccaacatactactataatgggtatttcaaactggtctagttacctcttgtgcttggtcaggatttaacaagccagtagaacggaaaccatgttgacgtagaaagttagcacaattcaacctcaatgtttcggatgtttgtacaccggtgctcactgcttgaaactttttctgcataccatataagtgaaatttgattaagcaagcagaatcaatagaaagtttgaaaaggaggaacaaagtaattaccatcattatctccttcttgaggtgcagcaactcaagtttagctttatcgtatgctaacttgcagagtagtgatctactctcaacacgtctgcaataataattgcaacgaatgttatatacttggcactgatttattttaaagagtatatgaaggcagtacagggagaaacctctttgtcttggcaccacttaagtggtcacatactttctacaattagaacaagatcatcaatgtacatttatgtagaaagaatgatagcagaagttttcttataggctgacctgagattgaatttgtagacaaagcatctcacacaaatgaacctttttcatgtgtgttaatatatcttccagcttgcatatctgcacttttggaacattagtactgaaactataaaagctaaaaggaaacagtctcagtagccagattgggtttccacagagaggaataacataccagtcttgagttcagcttatctgccaatggagcaagcatttgattgatttcctttgatacttttcctggaatctgcaaggtagtggaacaataacttaattgtatgaagaaaagagggactaacatccgttaacataagaggttatcaacagtacttacttctacccagttcacttgttcacgaactctgcggcaatcgttagcatcaatgtttccatcagggtgttccatcactgaattcgaaatatactttgtacttctctcgactttggggctacaatttctagcagcacaatcaacatcttctgcttttcttttcaatctggatggtccctgcaaattaataaagttcagaaatcaggctcaacattaaattgtatcattacatccttacggatagctctgaaatatgatagttcttctcctgcattctgagtaatttatttcagaaatgcactgctcaaggtctttgatggaatcccagtcaaaattttcaatctgaatgaccttttagcgggttcttaacctcttacaatggaatgtctggttcagctgttggtgtaaaaaggccaatttggaattttacaaccatctcagagatcaacaagatccattcacgttcagaaataaattgtgtaattcttatgtcctgtcgaaagatagttcttcaaaacatgtacatgggtctaggattataccttagcatgtgaagcctcattcttgcttctgtccacagatgaagagccagaggtactaggaaggttttctttagctacagcagtaaagtcttcagctgagataacttctgtttcacaatggactttaaagggattattatctttcagaaggatatgagcagcactgatattggttctgttttgctttttgttccgcacactgtccttctctctttgttgagcagagccattcaagaagcctgtatcggtaagtaatacgctagattctgcaagcagggaatccactttctcagataatgtattcatagaacaattactagcatattccttggtcacatttccatccccagtctcagatttttcgatgtctttactatgctgctcttgatcttgaagaggaacaaaattctccgatgctgacgttgttgcatttgacaaatttgttggagatgacacaaacttctcaggggtgctggctgcctgatttctctgttgttgtttacagagcagtgaaccttctatctcagaattagtatttccttctggacttctccgtgcaaacacatcgctaatgtcaacagcaggaatcaatgcaccgcaactgtgttgatctggtatgcctttcttttcagaaactggtggcctgtcatcgctagtgtcaacagcagggctcaatgcaccactactgcattgatctggcaagcctttcttttcttgaactggtgttctattatcatcgctagtgtcaacggcagggttcaatgcaccactactgcattgatctggtatgcctttctcttctggaactggtgttttattatcatcgctagtgtcaacagcatggctcaatgcaccactaatacattgatctggtatgcctttctcttctggaactggtgttctattatcatcgctagtgtcaacagcatggctcaatgcaccactaatgcatttatctggcatgcttttctcttcagaaattggtgttctattatcatgtttagataacaaagcctccaagttggtaatgggtatatccgcatgcttatccctgagtacacctatttcttccctcccaattgatggggtagtcagaaaacggtgtccggataattgaagctttgatttctcaattctttgagaaagagcagaaccaggtgacggtggaatcaaaccaagtctggatttgcttttctgaatggttgacaagctctcaactagtgcccgagtctccctgctcataaagcttccaccctgtgtaggggaaggagtaacacaagataaagactgaggcaacataccaactaaaaacgcactttgccttctaatagttgacgaggaaagggaagcctcttttgtgtaacgttggcttcctgattcctgcagacctatgggaatgcatccatttggaagggacgaggaaaaatcatcgataggtgatcttgcttccacagtattgtcttcaggaagcaattccttgctttcatctcccattagagctgctagtgtaggagatagatacccgtaatcatatctccgagaattttcaccgacgatactcatatcattcgagtctctaccaccacttcctttatcaactggtacaggtgattttggaaatagcttcttaggttctgttaacaccattgcacttcctgtatcagatctggaagtaacctcagttggtgttttctcttctactagaagatggctactcgtaggggtccttacatctccagactctgacctagcaagactccgaaaatgcatcgaaaacgccgtagaatccatcgtcatttcatggtgttcttcagagataggagtatccaacaatcttccaggattaataaaatgggaagacacaggaccgaagaaattatcctctggtaacgaaaacaaaatcgattcagctaaaaattcaaagaacaaaaccctaaattcacagagcaattgaagcgtaccgttatcacttgtagcggaaccaacagtgctacctcctgaagatggagaatatttcggcctcaagaatgatttatccaagataggttcgtattcaccatcaccatctccgtcagtatcttcgcggtcagataattcaccgaaaaacctaattactttattatcctcatcaggctctgatgtatcaccaccgttttggggtttcgcggcggaggtattgggcggcgtctcgtaatcttcgtcccggttgaaaatgtgaacggaagtaatttcccggtcggcgaagctcactcgtcttagccgcttccgccgttgcgctatagattcctcgtctgttcctattccggcggtgttgttcatcggatcttctggcttttccgatgccattgggggaattttcgaatttttagggtttgaaattgaattattaatgtgcgggaaatgcagacattttaagttttaatttgaacagtactgagaaggaagaacattttgattttgattgaattgattaaatcgggtaaatgaaatttcaaacatagttaggcctaaccatttgattaattagattaaccggtcgattaatatttattctataatacttttttctttgtacgattgggccttacttataaagggccgaataaaaaagcccatttaaagaaagacttctttttcgttttgcatgtgaatgtgttgttgggattagattcgattcttaaccatcggtctcgttcatttcgacttcacttttcgtcctctttcttcttcagatcatgtatgtatgtcgctagtagacatggatccatcaaatctctgagacacctgagcttgatgaatagccatagacaaagctcttcgatgcaaattctcttcaacagcaatcaacttcctctgtgaacgattcattctcttgcttctggatcaatctcctccacttctgataacaacatctttcttcttcatgcagattactctgttacccattattcacaaaaccctgaattttgcccaaagtgattccatcattgcttagctttagccgggttcttgtttggagctgttccttatgcaaaaaaaatctgaaagtttcttagcgaattgttacctctattaatttcaatggaacagaaattgtaagtatctttggttcgtttatgtttttcttagctgttataaagatccaaccctaactctttgaaccctaactttttttttttcctttgatttttgacagcaaaaccgattctatgaatgaggacagaatcagtgacttgcctgatgctttgcttctacagatattgtcttcacttccgacagaaaacgccatagccacgagtgttttgtctaaacgttggagatctctttggactatgttgccaaaactcaagtttgattccaatttcaatcctgtgtttgatgatgataacatagatcccactatgttttcagagaatgtttacaagactttgtctttacataaagctccggttctagagagtttgcatttgtcatttgaaggtagaacagattgtttgcatgttggaatatggattgcaacagcatttgctcgcggtgtgcgtaaattggtattggatagtttctatcaagaggatcaaactgtcacgcttcctagtgttttgtttagctataatgattcacttgagatcttgaaactcaagtgtgctatcgatttagactttccttctcgggtttgtttgaagtctcttagaaagctataccttgaccaagtacatttcaaagacgaagaatctgtttgcaatcttttatgtggctgccctagtcttcaagatttggtcgtgcatagatatagcaatgccgatgtggcgactttcacaattgcgtcgccgtcattacaaagattgaccatagaagatcttagacaagaaggaggttatggaaatggaagctatgtgataaatgcccctggtttgaaatacttgaacatcaacggggttattgatattgagtcttgtttgattgacaaggcactagagttagaggaggcaaaaatcagtaacgtttctggtataaccaatgagaacattctggagtctctaacttcagccaaacgtcttatcttacacttatcaccccttgaggtaagcttaagattgaacattttcgcttggttattttctctgcaaattgggctaacactgtttttgtgtatctaaaatgtatgtaacaatgttacactgttttgtggaaatgtacttaggttaaagttcctactggtaaaatcttcgatcaactaggctgtctagagctacttacacacgaaagagagtggtggaatctgctttcgatcatgcttgatagttctcctaaactacaaatcctcaagctcacggatgtaagcaatttcactagttgtttgtttccacaactccactttcaggtaatttgttgatttagatgacataaactgcattgttcccaggtatatctgcatgacaacaaaacaaatccggacgaacgaaaatggaatccaccaaaatgtgcaccggaatgtttgttgttccatcttgagacattcttgtggataggatatgaatggcaacgaggtgatgagaaagaagttgccacatacatcctagaaaacgcaagacggttgaagaaagcaactttctccacaaaacgcatcggaagggaaaagctcgaagattttgagaagaggcgtgagatgctcaacgagttggctattgtgctctgggattcaaattcatgtcaccttgtgttcgaatctacttaatatcttagacttgtattttgttggccattgggaaatgtttacttggctgctctaccatatatgttagatgctaaatgtttggtgaccttttgaggaagagtatcagaagattattacttctatactagataataatccgcggtatattgcgggttaaaatctttttatatagtataaagtttagatttgttgccatccgaatatctattttttgaatatcttgcatcaactagaagagtttctctcaatgctaaagtgcttcaagagattcgttggctcaatcttatgaggctatataatttatttcatttggttgcaaagaaggttaaaatgaaaaatacttgggttcaaatactacagagcattacaaatagttctacggcacaaggggaggaaactcatcgctcgcggagtgcatccaaacttggtttgcgacaaggcaatgctaaggatagatttaaactaaaagttacgaaattttttgcattaaacatgtgtaaacttttgttttttctttgaatataatttaacattagattcaaacaaaaaatagtttcctgcgacatgacattgttgtttgaagtcaggactatgatgttatcatttgtcaataaaagatgaagaacaagataagatttacagccacatgacacaacaataagtgaatagacaaaagcttcttaattgtttccaagaactactactcaagtttgtatgcatgaagaaaaaggcaaaactctggcggccaagggttactactcttggtcgaataatacctgctccctgtacttgtatcgctctcaccaccaccaccaccaccgtgaccacttccttccatgtcgctgtcttcggtggtccctggtttgaatatgaacaaaccatggcctgtcccaggcatgctgaacaaccaatcatacacgtcccaaaacacttgaacaggttgtttatctaccaacactgtctgattccctctgaatttccattgcaaattcttgacttgtatcaacacaatcccatctatgctaatccacatctctggctctttaggcccggaggtcgagctttccacgatgatctcgtgttcttttttcctatcgtaaaacttagccctggtggtgaaacacttcttgccaaacacgttttctttcttgtagaacaaggcagcctcgaccaaagcaggcctcgactttgttctcttgaaagctttcttcttgtaatcacccacaagcaaaaccacctcttcctccgagactaaagccacgtagaaatccgagctcggctctggactactcgtgaatttcgcagacctaaaatcccaatacacctctaccgggttaccttccacatcgaacgacttgtagcctttcttgttccaaaaatgccaaggcttcagatcaaccttgcaacaataattcatatcgccttccacgtttgtcaccatgaccataagcgaatgattcatgagattctttgaccacaataccgtaacattcctccagaatccggatatatgcgcttggtaaatgcacgtcacggtgctttgtgctgtcttgtacgttacaggatcctctgttaccttctctgcgaattgactactccctctcgaatgtgatctaaatgacatgatcggttctcaacttatacatacaaaagatgacaaattttaacctaaatattggtttcacatgtcaaccaataaatggtgtcgatgttttcttagaggctcgtgaacaaagcaccttgtggcttctttagcagatgcaagaatgggagaaaggaaacaaacgaacaatggatatcaaattaattagaaaataggttttggaagaaagagatttggatagagatagagaagagaaaatggattaaggaagaatgatttggagaagaagatcgagaacctccatgtaaggatgatgatgacgcgtaaggacgttgaaggatgtttcatcttaacaaacagaaattgtatttgttttgtcatatctgttttttctttctattttttgttttgttgataacttattataacaaatccaattggtttcatcaatgccagatgttttttttgtgttaaaagacaacacaatgtgactctctctctctctttatattttttaggtgatgttctgttagttagttggttcatattctcaagaatttataagagttgttaattagttagtacaaagaattcaaattaaagaacaaacaaataagttagaaatacaaagggttttttatcttattgtcttaacttattaaatacatagtatgaggatcttttgtgttgtccataagtatacgtatacatagtatatttcattttttttggtaatattatttaatagccaaataaaacataaaaattaaaaaattagtagagagaaaagtttttgttgcaaaataattatggacccacgttgtcaaaaggagtaaaataacaaaactaccttttatttattgcgaaatgaacagtaaacgagacagttccgtgtaatttttcaaaatatcatgtaacatttaaatttcacatgttacatttaggtaaaagacatgctatttcaaaaaacgtaataattttttaagaaaaaacattgttgtagaaattttttacatgaatagaatcctttaaaaaagaaattacatgtgattttaataaaaactgtgtattagtaaaaaataataatatattttaaaataaatcacgtgttattttaatataaaaaacgtgtattactacaaaatatcatgataaagggagttattaaacttaatagaatgattttccaaaacatatcatatgcttcttataagtaacatgtaatacgaaaaataacatgataaaaggagagatattatgttttcgcatgtatttcaaagaaaacgtgttataaaggattaggtaactatatgtgctctccaacatgtttctgacaatgtactgtagcatataattagtttgttaattataataaaaattttggctattttgtgcatattctctctttttttttttttttatcaataggatgaactatttatagattcctatcaacacttgttcgttacgacggtttaatgacatatatggatagttttctaaagtccaattttacatgattttatcgtagtgcttccgaaagctt

SEQ ID NO: 166 - DNA, 99804 bp, Arabidopsis thaliana
aagcttatccgttgatctacttcgtcagtatcaatccctttcttttaattaaaaaaaagtgagatttgcattcatagcttatcacatacagccaaattactttgccacacttatagaagatgaagattggggtttcatagtggatttgctattcccgattacaaatagaggtgaattgttatgctttgctaaataattcaattttaaaaaaatatttacgattgcatctgaaacatttaccattgttcgtttgattttttttcttgggttccctttcaacatccttagggttaagtttctgattgggtttcccttaaaatccattcacaagatgatttcaattttgaaatccagacaacaaaacacctaaagcttctcaatttctaattaatcccttttgattactttgtaaacaattaacaattacaaagtaatcaaaagggattacaaacaattcatttgattttccccttaggttccatatttactagttctcttagggattagtttctgtaaacgcaatcgagaggaaccagttcactatgtacacatctaaaacgtataaagtctgcttgatttttttacttgggttccctgtatagtatcatctttagggtttagtaatcttgaatcaatggggaattgcaactataaaagatttttgggataacagattttttttttgcagaaaagttggattgtggagaagaagctgcgaagatgaaggaggaaagagaagctcagatgaaaggggtaaaattgtcaaattccaaagcccaaagtccctttttttgaagcacactctcaatgtgcctaaaatcagagtttttaataaaattatttctattttaacaataagcccttaaaataattgatttggcaatctatgtcaccaaagtgcatttatcttttcgatcaaacgttgaagagaacttcaaagctaagcatgtttgggatgcagcaaattcaggatgagtgactttctggaaagtgattgtccgaaccgtgtgaatgaggacaaagcacaggaaaatatcatgtggtgatttgtaagggtggtaaaaaatcttaaagcctctcgtacatagtgaaccgacagttggacagtggtagagcccatagacccgagaaaggacattaatgctcattagtagaaacggtcagagcattacaaattgtgtcaagctctgatatgcttttcacatgcttcttaactacttttaaaaattggtcgatgcgtggttagtccatgggcacaagagtgaataatatagtttttagtattcatacctacttcatatttttttattttgaatatatgaaagttcaagtttgaagaacctatatctcctagaggcgggacctacataaggttaaattcatcttttttgtacataaacaagtagacatgtttgccgccaaggaggtgcttaaacttggaatacgtaagactataggatcgggttttggaacttgcatctggactgatccttggataccagattccccagcacgccctccgaagggacttacttcagagagagacccgcttgtttatgtcaattcattgattgattttggaacaaaacagtggaagatggatcgtcttcgaaaattattcccaccagatgaaattacctttatattagggataaaaccgagccttaatgtctcgagtgatggatattgttggaccatgacaaagtctgggaattatagcgtcaaatctggatatgaagccgcgagaactctttctcaccctgtttgcgatcacccttctcagggacctagtgttacggcattaaaggcgcaagcttggaaattaaaactcgaaaattaaaacatttcgtgtggcaatgtgtgtctggttgtttggcttcgtgccaacgacttttctgtcgccatattgctagagataatggatgtcctagatgtagagcagaagaagagacgatcaatcttttgatttttgaatgcgctccggctagacaagtttgggccctatctaacattccatcatccccaacattgtttccttcagcttccctccacaataatttagattatttgtattgggggtaaagaggtgggtgcagatgaagaaagcataaggatatttccatggattatgtggtatatctagaaggcgcgaaatcgaaagatttttgacaatttgagtgtaccacccaaggaaactttggacttagcaattcatgaagaagaagaatggagacgagcaaatcagcgagaaatccccttaaacgaggcaaaccccactacgccggtaatgacggtacctacggataatcttgtttgttttattgatgggtcttggcatggagcggaggctaggagcatacatggttgtcttgttgtgcagggaggaagattggtgtatttgggtttgaaggggtcacgtagaagcctttcaccacttcatgcggaattagagactcttctgtggtcgatgaagtgcttattggcagtaccgatgagtagtattcttatcttaatggattgtttggatcttttaaagatgacatctaaccccgaagagtgacttacttttgcatcagagatgaaagatttcgtgtattacaaggacttattttctacctttagtattaagtttatccctcgtagtggtaatacctccgccgatcatcttgctcctagcctccgctccatgccaagacccatcgcataagttagaacagatttagaacatatttcaaagctttcagagacaaaagcgagatcagatttagaacagatttctctggcgcataagttaaagtgggaaatcaagttgggttgaaattaccattccattacggaaccgcacataaacgtgcttcccattcaagcccttaatccttcaactatttgacgatcaccactttgtcactcttttatgttttttgatgtttagggttctgtgaaaaggatttattttgttttgatattttttgttttaagtcatatcataaccatatatacctctcaatagtttttggcgactatggattcccgaaattttttggcaaagattccgaacatagggaccctatgataagggtgatagagctaaaaacaaatataatgaaagtgggtaaaaatgcagcggtaacaaaaattactataatgattactctctatcctatattgagtctccgtccttgcaaatagatttagaacattaatctaaatagattcaattgaatccttcttttgcaaattattatttagtgcttaaactaattgattgagatgttgaattagtaacatcgatactgtcagatatctcatatccgtatggctattacattggaaacatggcaccatttttatgacagtatggaaaccaatatttctagataatttttttatattataagattgggatcgtatttctcctttctcagtttcacattgattcaactactaacataaatgtgcttcattatttagactttgtaccctcttttgggaccggttgacttttggggtttgatctgaatgtgataattaagtaaattactttgttcaaaaaaaaaaaacattactttgttcatacatagttatataggatttttttgttcttttttttttgttaaaaggtttcatgcaaatttgttacaaatactttttgataattcagtcccaattgtttgttgatgagaatggataatgaaatccaaccatatactaagatcaatatttttttacagtaaaccaaattgattttttaaaatttataaccatttggcctcagttcacactgaaaaaaaaaaaattataaccaagtttcttcataagccttttcaagctaaaaccaattttaattgaattttttatatttaaataaaaacaaatctataatattaaagtgaagaacttgaacttaagcttaacaaaagttggattgaaaatttacatttgctctaagagaattggcacccatgaccaaaagtgagcttataattaaacaattaacatgaaatttgttttaacttatttttcaagaaacaaattacttttaaaagctatcacttacttgaaatgacatttctcttcgtttttccttttttcttcaacgtcttaattccgtctcaataatttgctgtcttcataaaaacagattaatttcatcatcgtatctaacatagacgaaaaaactctcactaatgttaatacatcatcatagcatatttttattttttagttaagaaaaacaaaatcatacaataactttccgttgcgtatatgaaattgacatgtctccactcattaattgcataaataaatcaagtttaatataaacataatttcaatggacctttagttttattttagggttttgtgcaaaaaaaaccttctagctcgtctatttttgcatctttaccttcaacttccaaaaaaatacaaattaatcatacgaagtaaaaagtaatacgcaatataatccttatatgatgagttagagagtttttttcacaaaatattttattttatactaatatattttattttagtttatacataaataagttgaaatttattataaacatattatttttacctaaatagatcttttgaaatcatggacttctaatattccaaaaagagcactttcaagtacttattataataagtttcagcaaaatcaatcatgccgaacactcttacgaaatcagctttgtctgttgttctcccttccccgttggtggtggttaaggatcctttacatttatacaacgatactagattttaatccgtgatacaccgtggggacaatttatcttttaaagttagtatatataaaagtttacaaattttctctatctataaaatatttttattttatagtttacaactgttattaagtaacgtcctgccaaacccgtcccgccaacccgtcccgtaaaaaaaaatatttattttattaatgttgatcttatttatgatatgtttatgaatcattgtctaaatattttataattttgtagtaaatgctatcaaatgtttctgcggtttgatgattataatcgaattgttatagtcatacagaaaagtaatatcaaaaatgattattttgtaataattaaatgataataaatattttgcaagttttattttagtaactaatcgtgtagataatgtggagagatttttggaagattggtaaatgtcaaatatttaattcaaaaattttctttctaattatcaaaaacaaacattaaaaatcagtggcaaccattgtaaataagtccaaactacaagatttatttaacaaaatagctgtaaaaatatatacgtaaatatgctaaaaaaaaaattgtaaatatttagcccatatttttgtcaaaattaattccacttgtttctccactttaaataaatcgaatccactacagtacatgaggcaaacgcttgaatttgatgtcgttttggagacgaaaatagtgtgtcatttactcatttatactctaaatactcgcaaggcatgaagtactttaaatcgtaaagctatataataccaaaacaaaagagattcatacccacacaaaaatataataacatggtaatattctcataatagctaataaaaatggcttttgtacttatcatgtcaattgaatagagttagttcaccaactttcatacagtatataattagtgatctatttgtatatttaaattccgttacaaatttatgatttatttacgtgtacaaacttttgtaaattaaataaataaatttatgcacactcttgtatagtgtatacatagttgagctggtatttttagtataatttttttttagggcaaaatcataaattatattattttgaaataataacatgtacaccgccccaaaattgtcataatggaaagaaacatagatatattgagaataactaaagaggataaaataagctacatatataggcacaccataatctagaaaagaaacgtaggtttcgctaactaacacaagagcaaaatctacttaaatataaatacatacagagtgcatatcaaaagcaatccctaataataatattactcttatatctatttagtttccacacacaaacataaaaataatttagaggaagtgagggaatgtgctgttcatgagagcattggccatgatgtgattagtcttctgtgttgggtgaaatgagtcccaaaacacatacttgtctgcgtttgtacatgtgaatgggttattcctttgacaaccatatcccatctcgaacatccctgtcgcgcaacatgccgctcccaccacctcgaacccttcatatttttcaccaatcaaacattaatacatatagttatatatatacaaattagagataatataatgaagttatttatgatggaattgttaatagctatagcataccaaaggaggaagggttcttgatgatccgcataaatggctcatagggatttgagaaaacgaggttggaaccagggagctctttgctcagcttctcaaccatcttatcaagcttgctgttgaactggacggctatgtcgttgtaccgtcctacgcactcacctccagtgccaatgttggtggctctctctaaaggcatgcatcccattggaggtaacccacctagtgagatctttctagcaccaagtccatgcaacttcttcacaaattctttcgcgattccggctagaaaatcttggtaaagactgacggaatattgcgaagaacggcccggaaaggcaaagtaattctcgaggaaatcgttggtccctatgcttatgaggtagagagagctttctatagtctctgtgcctctgtcttttccttggtatgctttaagttttgtttggtattctttgtagtattcgagttgtttccatagaggtagtaccgactacaatcgcaatcagtggaatataattactacatgtaggataatatcccaaaacaacatttgccaacaaaacaacatgtagtacaaagatttgttacattatataaccaagacaactatgatagttatactatatatctcatcaatcataaatgtctataaagacgtgtagttatgtaacatatcaatgtaataaatacaagggagagaaaagtccgtaccagaacatcagaagtggcgttgtcatagccagtggcagcagaagcaaaggtaacacctgttgcaaaatccgaaatgttataagaaggatccaagtacgccggaatgattggtttaagccctaaggcttcggacataaaatccgtcgcaatctttccgttacaaaaccgtccggtcggctttccaccaacaaagtcccgtccatatggctcaaagttgcttctagcaacagttgggatatagttgttgttcccggcatcaacggaagagtcgccaaacacgatgatcgcgggtattttaccggcaaatgttacggttgaagacatagctattaggaaaagaattgtgaagagacttttgaggtgtcccatagtgtttgtttttgtggttatgattgtgatagtgtgattccatgagctgtataaaagaatagaggcctctctttataagaaaacatgagtgtttgaaatgtggtttcattgaataaggagaggtttgttgtgtgtttcaattaatgctgaaaaattctggtgagacattattattttcagcacgatttgttgtttggtcgtttgccgctccatcaatactgctctcttttaccgttggattgactttgctatgtgtgtactctctaaatttttgtagttatatgattagggatatgactaaaaagggaaatatttgtgtattaattcttcagttaggtttcagtttatgaaaggaattatctgtcgagagactaaatgatatatttagttgagtagggtctacatatcttatctcatcatcaattcaagttggaataatgttttgggttttaaacgatatggtctcaaaatagttaaactttctgaaattaggatcttgattacatgaaggaccttagatttaatcctctttttttttttgtcaaccgatttactaaaaaaacaacaactcaaacgagctatttgtggagtatgttgtttataaatgtgatatgatgtggttcgatacggagttttcgtgccaaattatccgcttttacatctgcgagaaattaataataaaaaaaaagtggagaattcttctctattgctcttaaaatccgccaaatattctgaaggaccttagatttaatcctatctccatcaaaatattaagattaactttggaaaaataaatgatatttttgcttttaaagtttgatgtaagtaacattttcatagttttatcaaattccatcgccttaacgttgttaaatgcaagaatttgatgtgatgtgatataagttcaccctttttgcatttttagtgatcatgaagtatatgttttatagccaaaatgagaactgaagtacatgaacatagctctttaaactaaagcccacaacaagaaacataacaaataaattaggacgaaaaacacgaaacatccaacaacatgacttaattatgagaccatgtcattcctccaaagtatgattggaagtgtatctcttttattacaatatttactatcgccgggattaaatgagacgattaagaaacatagagaggatttcacaaatatctaaaagcagaaatggtgtgatgaataagtcaattatctatttttcccttaaagagaaaataaatttaaagagtttttggaataataagcttttgtgtttgtagcttttcttttatatagatttcagacaacccaaaattgaacagtttaatcttttttatccatatgaccaaccttaaaaaaaagttagtttaagaaaatcagaatcctaaaggttaataaaaagataagctaaatttatcaaatattttgatagtcttggttactatttttataattgtcagtccaactttttgctataagccccaaatatcaaactttttgctataaaccccaaacttatcctaagtaatactcaatctgttcctttttgtttgatcctttaggaaaaacacaaatattaagaaaacatatgaaatgttgcttttaaatttactgtttttcgtgatttacaattttcaataactctaaaccaataatatttaataatttgtatcgaagtttacaatttatcaattataactaacaattattgcattgaaaacctaaaaaataatcttttttaaacaatttttttttctaaacaatcaaacaaaaaagaacagatggagtactaatttaacagaagaaaaaaactcttacttgataagttttagatccaaaaacaataaacataggccattcaacatctacaatcactcactgtaagtctataactatcactgtctcctaaacaagtatcactatgactgatgggcctcaataacatgctgataagaagtgggcttaagaggcccattaaagtccccatgagaaatcttgctttcatcgcagttcattgtttaacaacgtcactttcactctttcagagtttttgattctctctcttctccgaaatgatgtttcagattacaaagagcaaacttcgtttccctctctcaacattcactaagagatactcatcatttcaagctgctaaatcggtgattgacaaggctgcaatcgatggggagctcagagttttcatcgtctccggcgaagtttccggcgataacatcggttctcgtcttatgtcctcgcttaaaaagctctctcctttacccatccgtttcaatggagttggagggtaagcacttgggtttcccccaatttagaagtttcttatgaaaagttttgattctcaattgaaaatttcataaagttggaacatttgtatctttgcttcttacaaattgatagatccttgatgtgcaagaaaggattgaattcgttgtttccaatggaggatttggctgtaatgggtgtatgggagcttttgccacatttgtataaattccgtgtgagtaaccttttgaatggtttgatataaagctactctagattcttttgattgactagtctagtttttgagatactaggtgaagttgaaggagactattgatgctgcggttaagtttaagccacatgttgttgtgactgttgattcaaagggcttctctttccgtttacttaaggagttacgaggtaaacaacacaaaacttgtttcatcaaacttgtacgagagaatcattgagctttagtgaatagaatgcttgctaaacagtgtcgcttaacgactaagacatactaaattcaaagcttcattgtggttttcgaaaagcacagttttcttgaatagtaccaagatttatgtatggaagcttcttctccagtaggaacatgtttttgcgtaatttgacactaatctctaggatgatgtccttgattttgttttctgtagtagaagttgaaaaagtagagaaataggaaccttagaaatggctttttgaagccaaacattcctgaatgaagtcatatatatcatgtaggacaatggaggaatgctttttggctttgcagctagatacaagcagcagcggttggaaaattgttctgtgcattttcactatgtcgcaccgtcgttctgggcttggaaaggaggagagtcaagacttggaggtctgtctgaattcgttgatcatcttttctgcattcttccgaacgaggaaagggtttgtagggagcatggggttgaagcaacgtttgttggacatcctgttcttgaggatgcttctgagttcgaccttgtatgcgttttcttcttcttcttcttgaattacctcagtttctatgacactctgtcagaattctaagtgaaatggtgctcttttctgccacaggtgagaaggtgcaagcctcaggaactgaaacttgaaggcttgagttttagcgaacactcaataccttctggtaatgtgaagtttatcaaaatgatttaacttttctacagattggatatctacttttattgatatctcattgttcttctgctgcattgcataacttttcatgaaacaagactccactgtcatttcggttctaccggggagcagattacaagaagttgaaagaatgctacccatattttccaaagcaatgaagctactcaaagatccgtttccaaaactagtaacgcttatccacgtcgcatccaataatcaagttgatcattacattggagaatccttcagtgagtggccagttccagcaatactagtccctagtggatccactcagcttaaatatgatgcctttggcgtaagtctttgaaacctcgttctaagtgtctcatctgtttactcctctcattttgcggtgttccataataacaggcgagtcaggctgcattatgcacttcaggaacagttgctgttgagttgcagcttgctcatctaccttcccttgttgcttaccgagcacattttctaacagagctattaatccgttacaaagccaagataccttatatttctctcccaaacattctcctagactccccaatcattcctgaagctttgtttcaagcttgtaacccttcaaatctcgcatcgatactagagtatatctttttcttttcacccacttttactttatattttgttatctggcaattgagaaatgggcatgatgatgacgtgagatgttgtttgaaactgtaggagactactcttggatgaaaagatgagagaaagacaagttgttggtgctgagaagttgatacagctcttgcatccgtcagaaagcagaatgggcaactcaattcattgcactggtttggaatctcatcgatatacgccaagcattttagcagcttcgactattcttagttatgccaggcgttaaaaactatcgtgagtcacatgcctttgtttgatactagagtacgctgagatacttgctataatctaaggttgaatttttttcataagagttctaacatatggtaaattacagttaaaggcgaaatgatccatgtagattagaatgtctcagcttatttggtttgcagtctaagacaaacagtcaaaaagggctttcgaaagcataaaaggataaagtgaaagtattgaatgtctaagcttatctgctttgcagaaacagataagatcctactagtgtggcttgtcataactggtttaatagtatatttcgctgtaaagatcgatacagaattgtgggagagtgaggaataaaccagacaaagatgcttccaatctcatgttctcaaaccccaaactctctcaagcaatgcaccaatctccatgtacaaaaaagaaaaagaaacattctcacaacagtatatttgttgatgaaaattcttgcaagagtatatgattatctggttctaagagccatccattgcaatatcaccaccagttgttggctttggtggagttgctccaaaagtgaactcctgaggagggatacttgaagcaggagatgaaaatatagaagaagtaggagcattgttgaacacaggagcttgtgcttgattatcaatcttagggaaaccaaacccaaacgttggagcatcattaatattcatcgccgacatcatctcagatccgaatatcccctgctcaaactcctgcagttgttggtaaaactctgtgtacaaagaaaaagcaatgagtaacagtttcaagaacaataagtaagtttctaatccaaagtctaagtacttgcctggacttatgtcagtgcttggtctccgttgtttaacccactgatgactctcagcgagtctccacccttttcgtttcatcaagtacgctacaacaaccgctggtgatctgtcatgtaatcgaaacacaaaacatatcactctattagtctaaataattaatggtaatcataagaaagcagccgcaagtttaggatgagagtaagagaatgataaatgtactcacctacttttcccagacatgcaatgcacaagaacacgtgccttgtccttctcacattggtctacacaaagcaagaccgtcaagaaaaaatcataaagatgaaatctagaaacttgagatagaatcaacatacctaagaacttaatagcatcatcaaactgtaaaactttttcattatcaagaccatgataagtgaatgaattcctgtagagattctggcacataggaaccgtctgaaacagagtaacaaaaacagagtcaataccaacaaatagtaaacaacacattcctctctattaccataacaggaactttaacagaaaccataagtcaacaaaacgtataagtataagaaagattcatctacaaggcaaaaccctaactaaacaaaccgattcaaagattcaaagatcttatctttttcttaagggtcatcatcaatgtttaaaacaaaagcaattcatgaattcaaaatcaaagcaaagaaactcacattaagaacacgagagattccttgagtcttaagaagctcagagcgagaagcgttgtcgtaactaccgaggtaaagaaactcagggagaatctccgacggaaaagcactgacgtggacttgttgcggcgccaccgtatcggaagaaacaggcatacagtgaccacagactccacatacttctccttcctcgtacttatggtaatgcccacaaatcgaacaagggttctctctttctctcttcctcataatttgatttcgaaaattaaacctagatctgatttctgatcaaaacccagatcagagaaaacccttgatttcacagacggaggaaattagggtttgggtttggagaaatttgtttgaacggaagaattgggaaggacggagaagaaggagagacttgagaagagagttttttttgtatgaagaattgttttcttcttcgatgggattaatactgattcggatagatacgtgccacgtggagtttagatttatgtaaatcttctttaaacagtctctcagtttaacaggttctgtaatagatacgggagagagaggatctctaactgagtcaaaattgttaactgagccatttattgcagatttacttttctttttttttgttcaggatttacagtaaaaataaaaaagaattttttttttttatttaagtatatagtccatttttttatttaattttaaatttccaataatattaaatcaatatacatgacaaaacgtttaaataaagttacaggcccaaatacacaataaaaaccgaaattaggccgcatgtccaaatagatggcaaaatgccaaaaaccgaaacaaggctccaggtccagaagagaaaccaactgaatcttctactgaaaaacgccaaaccaagtgacaaggagagatggacatgggcggatgatctgttgagctcttgataagagatcgaggtgacaacagaggatgtttttgatctcaagaacaactgtagaggcaggtttccatatatagtccatttaatgattggattttgctaattctgttagggatattgttttatgctaatttcatacttattattatgttaacttggttttaaagggtaaagtaaaagtttaaataataaagttatttaaatttcttttatttttgttgtcgaccgctaataatttagcttaaaagagtcattcctaagaaatgttgtttacataggtaatatgatgcggttcgatacggatttttcttgtcaaagaatccgctataatatttacactaccaaaaattaaagatgaagaaaaacttgtgaattctttcttattgttccgtaattcctccaaatactctgagaaagtcgtccattcggttggagaagacactatattcaccaggtctgaacagtttgtaaaaagttatttaaactttattaaatacgagaacagtatttgataagggaaactgaaattaaattatttattttacaaaatttaataaatgtgacttctcgcaacgtcaaaaatatatgtacatatatatatataataaatgttacgcaaattatgtagaattcattgtcattatgtatgcatagtaattaacttttttacgtctacataaacgatttcgatcgttgtaaatgacattcattatttcaattacaagagaagtaataaaacatttttctcctcttttgtctctttactatttagtattttgatcactttacaagtttaaaaataatctactatttatatttatatccaccataaaaataattcacttatttgtaacaatttgtaaatttataattcgctataagtgttaaaatataggagattgacataaatgacactaaaaaggtttattattgcaaaaatgacacattcttttaaaacttgtacaaatagcacacaaaaattttaatcctctaaaaattaattaaaataaaatatagaaaatacacaatatctaatctcatttcttccaaatccaacagctttgccttcgaaaaacccgacgacttcgtcgctcaccggatcaaatctgaaatcttcaatgacactctcaactaagcccttgaatgagatattctcatctacctcacaaagggatccacctttgtttgtgtctacaagaaaacccactaaaacttatcattttgttcacactctccacaaacagagtatatctctaccatttatataccaaccctaaagaaagcaacaactaatacaataaacaaactagaagatctatagtataaaaacaccaaaaatctacaaaactttcaaatacttggacatgacttacaattatttcagagattcgcttgttttttaatgtttgtggatgatatattcctgagacaacaagactagctgcacaaagaggcaaatatgtcatgttaggtgttcaaaatcgattgattttgatgcttatttgcagtgaatcaattcacgaatcaacaaattcgcctaattccacattgaacgcccattataccaatattaatcgtctaatttcgtttccgaaacgtttcgaaaacgagaaacgcactacgggaagagttcccatgcaacatagattattattaatagagccaaaaaaaccggacactagtaaaccaaaacaaacatgggccattatttataacaaggcctaaaaatgaaaaccaagcccaacaagaaaactcttaggcaaagcaacacactctgtcatctctaaacgtggtgccgtacaaatgaatttcattgacttgtttacacgcgtccaactcgtcatctctgttttgtctatcgccggattggaatattcgccggcaaagagagaacagtcgaatgattctttcttgacctggtaatcatgtggaaaaattaacgattctcaaataagcaaccaaatctcttttgatttctactgagaataaatgattcagttctttttgttataatcttttccacaataccatgctttaatagatcttcatgcgctttcttaaacttccatatctctattgaatttttagatcttgagatctaatccgattagaaggttaattttttgaagctccatactcttccgtcaaagcacaaaccttagagactttcttcttcaaaattgaatgtcacatatatcagaaccattaatgtcacatatatcagaactattagagatttaccttgaagtccaatgtttttaaacccgacccggacaatgaaccggactaccttcttggttactgggtcattgggtcaaccaggttgaaccacgaatcaattttttttttttttttttaatagagattttagagttttagaatttttataaatttaaaaacaaaaataatcatatcatgtttataaaatataaaatcagattatgtttaataaaaagtaaaatcatttacaccaaaaaaaataatatatatatatatataatatataatatcaaacaataataatgtgattaaactttttaaatccaactaaatgtttaatactgtaacaaatatagtaggagattaccaatgccgaaaataaactaataaaatattgtgaattcacacaattaataccgggtgtctcactcaccattcgatttattttttaagacggcactgtgaagtcttcgtcgaaatttaaaatatcaaatgagtttaacaactgaaattttttttaaaaatgattaaataaagtataaaatcctatattttatttcaaaatgaagagagttttttaaaaccgacacccgactggttcaaccggttcaccaggtcatgggttaatggtgagtttttgtggggttttttcgtttttgaacttgtcgggttttagcactttatccaaaccggaaaaatgttcggatcacgatcaaccagtcggaccggacggtccgagtcgggcatgaaaacattgtaaataaccattccattgttgtcgcgtttgactcgaaaagctcctacagtgcacggtttgatgattaatcagtctggttaacgattatttgcaagaatcaattaatttccggcttaaccgattggttaaatatgattaaaccattggttaacttcatatctagaggacgaatttaaatccctgataaattctaaaaagtcccatcatcgccgtcgtctccgtcaccgtcgctgtgaaatggcgacatctaatctccgtagacacttgagcgcaagtcgcctccgcttaaaccgcttcatctctacttcttcttcttatcattcacatcgccgtgttgttgtcactggtctccttctctctccatgtacatgtattcacatatacttatctctgtaatttctctgattcgacattgttcctgtaggtctaggcatggtgactccacttggtagaggcgttgaaacaacgtggaggcgtttaattgatggagaatgtgggattagaggattgactcttgatgatctcaagatgaagtcttttgatgaagagacaaagttatatacttttgatcagctttcttctaaagttgctgcttttgtgccttatggatcaaaccctggtgaatttgatgaagccctttggctaaactctaaggtatctctttcttcttaaacaaactggcttgcagcttataaggacataattagtaggaacacagtcaaatctcatctcatattatatagttttagattagaagcatttacgtgttgcttgctattgacaacactgtctcactgagcagcaatgtctttgtaccttctcatggaggaaaccatttttgggattagtgctactcattttctgtcttttggaagcttaatattgtttgtcagagatatgcaaaaagtaaaggttttgttattgttgtttttgaatcctggaggcagttgcgaattttatcggatatgctgtatgtgctgccgatgaagctttgagagatgcagagtggttaccaactgaagaagaagaaaaagagagaacagttaagtcttcctcatctgtagatcaaatgatgaggacttctgctttttaatttggtttctctgatttttgaaattttgtaataccagggagtctctattggtggtggaattggaagtatatgtgatattgtggaggcagcgcagctgatttgtgaaaaggttaaacctttctgttgtctatgcatcattttctcaggaattagagtctcttaaggattgtcttatcctagttgcgtgtaagacttaacaacgattatggtgatgcagaggctgcggcggcttagtccgtttttcattccaaaaatattggtaaacatggcatctggtcatgtgagcatgaagtatggatttcaggtgtgttgaattttccagttttcttttatgcaaaagagtatgaacatcttagactatccaatggtggttgatttggatttttttaatgagagttttaattatgcaactctttctcattgtgataatggggtgataatgatatgggatttaaacatactttttattaacgtgtctagaatagtcctctgatgttcttaagtagtaaaccgtttgcatagcattgccatgcttttgaatataggggccaaatcatgctgctgtgacagcttgcgcaactggtgcacattctataggcgatgccactaggatgattcaatttggagatgcagatgttatggtggctggtggaactgagtctagcattgatgctctgtccgtagctggattctctaggtaactaatgatcggtctcacacgctttttgtgtgtttaaagctcatttctttcttggaaaataaaggcatatggtccaaagtcagcagattactatttacttttaccgcattaatgtctaaaaactatgctacagcatcttaaataggcacagacacaacaaacaaaaatgtttttaatgaaattttgaacctgttttttttgttttcagatcaagggctttgtcaactaaattcaattcttctccacaagaagcttcacggccttttgattgtgaccgggatggttttgtgtaagtcacattcttcgttgtttatgtgaaaataaaccctgttttgtttatgttgattccatcttttttgatttggtgttgcaggataggggaaggttcaggggttatagtattagaggtaagattttatggtcctttacttaaactctggaatcttggatagtcatcccctcagccgttttttggtcttaatccaaacacttttttgatttctggttatgacaaaaggaatatgagcatgcaaaaagacgaggagcaaaaatttatgctgagctttgtggatatgggatgtcaggttaagctcatagataaatagtaaaacgaattttactctcgtagataataatagtgaagcacattatgaattcattaagaatgaatcttcatgataaataggcgatgcacaccatattactcaacctcctgaagatggaaaaggagctgttttggccatgacgcgtgccttaagacaggtaacctccatattattaatcatcggccattggttaactgcagttttgttgttatggtacttctgttgatgatcatttatgatcttggctttagcagtttgaattataatgatttggttaaatgtccatgacttttcagtctggtctgtgtccaaaccaaattgattatgtaaacgcacatgcaacatcaaccccaataggtaaaaagattgaaacctcgtcttggttctctttggttttacaaaaactgaactgatgattctgataacaaatccacgatttctaggcgatgccgtggaagcgagagctatcaagacggtattctctgaacatgctacttcaggcaccttggcattctcctccaccaaggtaaaaagacataatttttcttattgacatgatgttactgaagttgtagtccaagtgataactatatgtctgctaaattttgtctgtaaataatttgacttgttttgattgaagggggctactggtcatcttcttggagcagctggagcagtggaagctattttcagtatccttgctatacatcacgtaagcattctcatttcttagttttgtgttgtgatgattaaggtttagtgacctaaccagaacctgcaaaaacttggtagggggttgctcctatgacgctgaatgtcaagaatccagatcccatcttcgacaagaggttcatgcctttaaccacttcgaaaaagatgttagttaggacagcaatgtcgaattcgtttggctttggaggaacaaatgcatctttgctctttgcctctatctaaacttgtgtaaacagcatagcaaaagttttgaactgatcttgctttgattgcatagaagattacattagtgagttccctatgaaattacagataaagttttcttgcaatatccttttcaaataaagtttttagcactgatatcaaatgatataatcaaggatgtgattttatggatgaacaaatcaaaggggaagttcttaacttcatgtatatctattatatatgaaaaagaactagagcattaaaaacctataattgactaatgggaaaattctaaaaaacaaatctcaattaagttttaatacccaacagtttttggttataataaaagtacacatattaataaaactacacaatttaatatccaaacaattaaatattgttatcttcatagtcacgatctcacaataaaatttcaattttaccctaacatcttagttaattattaatttttagatgatgtggcattaattttatgattttggataaaaattaatttgttaacattttattttacgttgtctataattttaaattttaatttttattataattattttatattaaaattcaacataaacattagaagaaataacttatattttaaaatagttaatgttacagtcttatttcatcgtcgcaatatcaaaaagacgttttttcttcgattctagattttctcaattaatcgatacgagaatcgcaggtaaaaaattcatgtccccctcttttgccaacattaaaattgataaccattgacgatctccttttaatcctatctaaaattttaatcgctatctaaatttatttgattttatttgtcgtaatggatatgatatccacgagtattgatatgaacttcctcttcttcctaagaaactcttcattcgaattaaatcttcacgattaagagtttcgacaaaatctcaatccaaatctcattgtctttctcgaaatttatcaattcataaaaatagctaattttgtttttctttttttaaagattttttgttatttttttattttcaattttaaaaataaattaattaaaaaaataatatagaaacaaaatatgaacaaaaagtaatttttaaaaattagaaaattaatgccaaatcatctaaaagtaatagttaattgagctggaaaaggtaatattggaatttatttttgttgttagatcgtaagtataaaaataacaacatttaattgtttggatattaaattgtacagttttattaataagtatatttttttccaaccgaaaactacttggtattaagcatctaaataaaaattaattgttgttttttttgggggaattttccattgactaatagtcacttattttaatttttgtttgaaatttgtactaaaaacaaccgtaaaaactaatattattagatgacaatcttaaactataatgaaaatcttataatttaaatatgtggccagttcataaatacaagatccaaatcaattaccaaggagataatcagcaagatttgcataacaaatcgttcaaacatataagctcacgataaaacaatcaacatagatcgctactggaacatctacagaaattattctctctctctgaaccatctagaaaatagcaataaaaagaacaatgagctccaacggctatttaagctccgtcaacaccaacggcaaaccctcttcccgatccagagtctttcacttcttctttctcttcctcaaagcctatgtttcttttagtgagtctattttctgttgactctagctgacgtggagttgactttttcttgacatacgattgatgaatcgtatcacacacctaatggtagtgaaccaacacaagatatgtaatcaggagaggactctcgaagattcccaaggtgaagaaacgaaagaggataccatctcaagctcaaactcaaactgcaaagtggctttgtcagaagatattcagagattaggattagggtttggtagtgtctttgacgaatttggttgcgtaatattacgtggatacaactcaaatctatgtaattcaccttttttgcattcttggtgattgatcgattattgtagtatcttaacttgtatgtgttgctccatgtttgtaaagttggtagcttttattctctctgtttattactagaactagatatagacccgcggtacaccgcgagttgattatttgcgttagaaattaaattattttttcaattcaatatcatctacatttagataatcaagttatattttgaatttatcatcttactttttatatagatttacttttgatgttatattagtatttgtttggtttgattctgtttagttaagaaaacctgtttattatacgcatcattatatagaatgtgtattttatggtgcattatgatgtgtttgttatatagttttttgttaaaaataaaagtattaaaattgtttaaatttaattttatatgtaattgtagttatctttaagaaaataatgtttttctgtatgaaatagatgtatattatgcttggaaatttataaaattcaaattcttattgtaacacaaatacaaaaattcaatcacttaaaattcaatcatgtaagaaaccaagataatccacaactacagcaaaaggctcattcttgtttcagaaacgtgctaatgagaattgaacaagtcttcactaacaacttcaaagataataatcactccgtcacagtgtcatcacttacccatctctgcaatttgacgactttcttaatcttttatgatactgctattgcttgtttaacaagtattttttttataatcttgataactttttttcatttaacttacattagcgagttccctatgaaattacagacaaagatgtttcaaatgcctacttttgcttgcaatatcctttaagctcttttaagaatatcttgacctgaaaccttctgtaagaggaatgacttttgcggatactttcgattgcaacttaagcacagcttcacggatttcctgccattgcaaccacaagtattaagatgaaatacaacataaggggctaaaacttttactaagaacatgaaagccaaattcagactctcacctctacatggtaacgtgatgagaaatgcgtcaataatacagttttgctccggatccactttgcattctcaataatctgcaatttgttcatggaaaattcctcttacagtgtgctttttacaggtgtgtttgaacataaataggatcgtacctgagatatatgagtatgaccgagtgcttgcgcatgctcagtgctaaaactttcatccaagaaagttgcctgccagatcggttaagctcagaaactataacataatccagtgaagttttaaaatgatataacagtaccgccaataggattcaagtaagtacctcagttataagaacttttgccctcaacgcatcagcattacgagggtcaagcatatactctgaagttgtatctccagtgaaggctatctcgggggataatatcgtgtccgtaatctgtaattaagttcaatattattgtactttatcaaacctcaatatcagaaatatggcttattataagcaacaaacctcgacgccagactttttaatcttttctatctgttttcctttgaggtgagcatactgcttctgcaacttcttcctgaccgaatagatgacataaccctaaaagaactcaagatcagtaaaaaaaaaagacgctctcatgccacattcacgatgtgtagtacctgacttggtataacatggtgagttgcaaatggtctaacaacaatgtcattgcgcaactcatatgtttcacctgccaccaccaacaaagaactcagattcgctatctaaacaaggttggcttttaacaagtcactatgtcattacctacagcaagtggtatcaattctacattcaactctacttgacccatagtcctgtgaatctcaagaagtttctcaacatcttctttaatagatggtggcacaaatattttcggtggctcaagattgtataaaccacggctcgctacatacattggaagccctccctgaagaaaacactaaacttagccacaagattcatacaaaagatcccataactcaatcaataagcagaaacatcaaaccaaatctaaaagtatgttcaacaaaactaatccttatccttccaaatcatagtacaatggctctattttgaactaaaatgtatcatcaattcaacactaagattcatccacaattcaatcaaaaggccgaaactttaaacgaaatctaaagagggttttgaagaaagactcaaattttgaacaactcacgatatggtcaagatgggcatgagtgataaaaagaaacttctgctgaatagcacgagaagggcacctcccaatatcaaagacacatttgagctcagggacgataacacaagtctcgtgcccacctacagagatcccttcaattgcataactctccaattcgacacctttacggttcactgcagcgcgtgctttccgatactcttcttcttcctcaatagctcggctaatcgatgagaaatagccagagactttgacgggactcacgaaatgtctacggttgctctgtatctgtgcggcgagctggtgagtaatcactggaggtttatggtgtttggtggaagggaagattttgggaggtgaaattggaaacgaagaagaaagctgcattcttttgtgaggttttacggaggtttttggggtttcctctgtcactcagacatgaaacgatagaaaatgcaaagaacggcctttttcttgggattgagtgagaccaaattaaactgatctactacatatgtatagctccggtttaatgctggttaggattgtttttcggttaatttggtttagtatagattgtaatttgtatatatgtatccaacatttgtaacaaaatttatagaggtattcaactattcatcatacaataaaattttattaatttataaaagtactattaatttatagagagtttaaactaattttgtaatttttaaaagattttttctaaaaaagattttttttatttgtaattattatctttttagaaccaattacaaaataattaaaatttattatgtatagacaacaacaaaaagagttttgaatgtagtaaaaatattaaaaatgaaaaaggaatatagcaaaggttatgtttcactaaaatttcttatatatatatattttaaggaatttataaaattattaatttatgatattgatgagagcatattatattaattttatacaatgatttttttaataaaaattattttattaatttatcgatttgtattaatttttactatagttacaactcaaaatcggaagaatttgttaatttataaaaactattagtttatcgaatattaatttatagaaattttactgtaatattataatttttagaggtttaactgttttttttcttttttttaagaaaggttttacggtcttagatccaaaattgatataatactcaaaccgaactaacgatttttcaatccaaccaaatagaaaatcgaaaaactaaaccaaaccaaatgtcagatactcagattgaatgagtggtaaggttccgtaataaaacctaaaactaagggcaacaatcaaaacacgtttacttttattataaacagatttctggagatatcgagaacattttcgcagccgcaagctacaaaacttttgatcccaaattcaacagatatctctgaatctatcgcttccaagggttttctctagcttaatctcagattcgaatcgttccatagtggtgagcttcgtgttcttctttcgtctcttactcctgattctcgattttagggttttcagtaattgcgtcggcggcgaaagtctttatcgccgatcgatcttccttatctagaaattattgatcagaaactgttgggttttgtttgattcttgtcaagttttgatttttcatgcgaaattgctcaatcccaattcaaagttacgatttttattgaaaaccctagattggtttcttcaagtttgtcactttgattcaatctaatagcttagcttaatcgttaagtctcttttttggttttaggtttcatttgcgatttaaaggttcttgttttggtatttgttttgctttggtcctttaagtttgagaggcttatgtagattataagagagaagagtattgctttgcatgtttaaaggaagaacttttaactgaacatttgtatgattggtatgtagatactatgccgaagaacaagggaaagggaggaaagaacaggaagagaggaaagaacgaagcagatgacgagaagagagagcttatattcaaagaagatggacaagaatacgcacaagtccttcgtatgcttggaaatggaagatgtgaagctatgtgtatcgatggaaccaagcgtctttgccatatccgtggtaagatgcataagaaggtttggattgcagcaggtgatattgtgcttgttggtttgagggattaccaagatgacaaagcggatgtgatccttaagtacatgtctgatgaggctaggcttcttaaggcttatggtgagcttccagagaatactcgtcttaatgaaggaattgttggtgatcttgaggatgatgatgataataatgatgatgactatgttgagtttgaggacgaagatatcgataggatctaaggctttgtttgttttttttttttccggcttgtatttccaatttgtgagacgtatgacttctggtgataaaacatcactgttgttgcaagatacttactgttttatattttgttcttcaatatctctattgttggtttccttggtgttcttgttgcataagtttgtctttcttcgcaatccattcaaaatgttgtgtgtcactgttgcttcacactcttaagtttagctggtacagagaagatgaatcgaaatgattatgcgaatgctgaagctgaaagtgaattcagttcagcttaagagagtaaaacatagtaagctgataatgcttgatatagaaagcattatgttgcatggattcatatggatgacatacataaaagtgggcaccaaaaatacagaatctacttgtccaaagagagaaaattatatacttctcctgccgaatatgaatactaaagacagtttaacttgttaacaaaactcaaaaaagttatatacttctcttgccgtatcgaatctctgccttcatcttcctgatgaaatcctcacatttcttgttcaaatcttctgaacttaataaactatcatttatcgcatcgtcatcatcatgatcatctagtctagtgattgagaggtcttgtactagtattccctcatcttccttaacaaccaatgcaacttcttcttcttcttctctagataaaacaactcttccttcttcttctttagaaacattactttcttcaagtaatgccactactttattgacttttgtttcttttaagtctttgatccctacttctttggtttgttcaacgatgttaatggctttaccgtgcgaaagggagtcagaattcccatggaaactccccaagataaagcccacaatcccattgcataacaagaacatgtacttcttgtccacaagattgctatacatggcaagcaaatggagtctttgttgaagagaagagattaaggaagagtaagatagtataaatgagaaaatggatgcaaatgctatgatcttagtgactattttcatctccttcacgcttctttcttgtttttgagattccatctcatctatctctatctctctctttatatctctcttgctctatgtgtcttgcctttgaattgagaaaaagaatggtgaatgcgcaacaagtttgcggaacctatttcttttttatagattagtgggtgggttgtgtataatttcaccattttaattattatttcttttggttaaattactcttttgaaccattcacaccaaattaatctttagtttttttttgtttgattatttttaatatatccctaacttagcttaaaaaattaccaaatagttgtcgataatataagagatattttttgaatacagtaaaacctctataaattaataatgttgggattgtgaaattttattaatttagagaggtattaatttatcaataaattaataaaaattaccaaatagttgtcgataatataagagatattttttgaatacagtaaaacctctataaattaataatgttgggactgtgaaattttattaatttagagaggtattaatttatcaataaatcaataaatattaatttataaagagattttcctaatttaataatttttaaaaaaaattataatttttttattatagaaattatgtttctaaaaccagttacaagtaaaacatattaataatttctagaaaacaacaccaaaaattttgatagagtaaaatatgtaaattatagtaaaacaaagggtaaatatgaatttaagcaaaaaattattataaatatatttttaagaattttattacatataatatatatatatagttgatacatttatataattattaatttatgatattgatgagaccatatatttacatagaactttcaaaaaaattattatcttattaatttatcgatttgtgtcacattttacactggtcccaactcggaacctgaagaatttattaatttatagaggttattaatttatagagtattaatttatagaggttctactgtactaattgaaaaacaagtattattatactttatgtgtataaatgtcttaaaattatacttttagaaatcaatagtgttttttttaataccaaaaggttatgggtcgaagtccgtaaacctccatgccaaaaaccacaacatgtaatattagtttcgttccaaccgtcactcgaaccggtgacctctatgtttcgtctatagtctttatcaattaagctaatgtcacttggtcacaactcaaacaatagtgtctttattgtcaactgaaacaaatgtttatcaaaaatatcagttttgttttctgaaaagatagcaaatgtttaacaacaatcggtcgcaactcaatgctactaccttccacgaaaattcttgagttcgtggatttttgtttttgtcgtaagcttcttttgtctgcctttgaaaatgtcattaaatatgccaaaactaaaagaccattgacttgatttgtgttttgtcacaaaaggccattgacttgatagatgtatttcaaagtcagctactctatggatgcttgtcgttcaatgtcgcgttttctaaatttcgtcattgttacaggaaggtttttggtaggttaataatagaaaaaaggatcaaatctttttaggtgaaagaaatagattgagccatcattattggtgggccctgaagaagaggtaatggtgtcaatgtgtttatttgtggtttcccaagacttacgaaactcaatttctttttaaaataagattgttgtcggtgaaatggagtaataggattcaggaaggtaaggacaaagcaaagccactagcttggcgatttttggccgataagaatttacattacaatttggcttttctaaagattttattactaaagatcgataactgataaaacatagagaatcacatgaaccatatttcaaaatggtgagaacattacactcattacatcaagaacgtttattagaaaccaccaaacgtaaaattacaacgacaaattcaaaagaaacctacaaagctaacataaaccccttatatgtcaactatcatgcgagaacgaaaccgtcactcatgtcctgtttgactgcatgttggtgaaaagtgtttggttaattacctctctatacctatgcagactcaaagtcctttgatctccataactgagcagattagccatctattgaatctaatggagaaagtagagttgcctaagaacttttgtgatgcaatcccttggctgctttggggaatctggaaggcaagaaactccactctttatgcggataaattgaatgatccctactttttggtcgctgcggcttttgaggaggcagattaatggcctaaacaaaactcactgactcgccaagagaatactcggatgatcaaatggtaactacattgtgagagaagatgagtcaagccactgatgggtaaattaacatgtaacattcatacttgatggataaaagattcatgtcacgttggaggtataacttggattctaaggaaccacttaggagacacagtttttcatgctcgaggtgcttttctaccaatggtgaactgcattgctgcagaactatatgacatactctggtgcatacgcacccagtgtcatgcctaacctatatagggcaccaaaaaataaaaaataaaaggctacattttttttctaaactaggcaaatcatttatttttatatagtgtttttggactcttttttttttggaaacaaaactcaaaatcattcaacatttatggaaatttgttatttgtttttcattttcattaactactaaatcttgtttttcgataaaaaaattttaaattgagcaacatttgctttgtttttttttttacattttttaaaaaatcttctctcaaaatagaatgtgttaggccacatttttaatttttttcttaagcttccattgactttggcatgaggctgtacgcaacatacatgatcctcatgtaaaaccgaacatttggtcagattgtaatgttgccttggaggtattgcaaaactggaggactggcgaaagtactggtcccaaattcttaagatcaactaagtaatataggtgatgcgggaggttagtttcaacatctcttcactaaaagctaattcgttggccatagatattgcttgcagcgttacaagagaagacgattcacttgttaattatttggcaagaggaggtccgacatggctcaaccggattgaagacgaacaacacgctggaagatgagactctactttgctccttgtcccctgtttttattttactttgtctgttttgttttgcaactttgctatttctcaaagacgattaaataaaaaaaatcaatatcaataagtctaactagctattgtttttaaaaaacattaaaattctataaactaataccccctctgtttctgaatatttgtaatttaaggtttttgcacacaaattaagaaaacatacaaatctcatttaatttatctctttcatataaaaacatcattaattataattaatccaaccaataaaaaactatgatgtaaaatataattggttaaaaactattaaatacatttaatgtttgcatagaaaaataaaaacaacaaagtacacttaattagaaacagagggagtaattaaaaccttaaatggtaattccacgatagatagaatatttactaaaataaataatagagttaaatgtaatgttgaagcaaaacaaataaaatgaaattacatattactcgtgcttatctaaaatctacccttcatctgttacaggtggaatatagaaggctgcttctaaacaacaatttagcgaacaatagtaaagagtaaattcttctgtagctctccttataaggaaggggaacttacaacgaagttcacaatggaagcagaaaggtcgagtaacaccattattgggaagtacttcatgagcgggatctctgggatctattagtcctagcttcgcattatataaatctccaagtacacactttaaatgaaggctgaccccacaatcatcacaagtatagtaaaatacactcggatctgtcttggtctcacaaatatcacaccacaagtgaccagtatcgaagtcagaagcaccttgacgtagtgacagaagatgatcgtcacacctatgttttactttacttggtaaagtagcgcacgtcatgcataatgagtaatcatcacacactatacagttgagatcataacctgctttggtgccacaagccttacactttttggaatgttccaaggtccagtataacgggtgtggatgcaaatcgtgtagaaagggttctgatatggaactacactgaagatcaaagacaaattcttcatcgccatggtcttcgtcacactcgtatctgaaaccattaggagtggtatcacaagtagaacataaaaatatagaagccttgtcaactcgtagagtgagtttatggttgtgcaaaaaatgtcgtctcttccgcggaagacttgcacatactttgtgaatgatgaaatcgcattccagacatttgtaggatagattgccattaatagcaagaatgcacccccggcaacgcgtagcgtcattttccatatgacaattctcatccaatctaagtacatgttcttcatgactaaaatgtatgatatccgtttcattaattactttgaatggatcttcaatttcttcatcttcttcggacacatcttcgagttctctaccatcccacacttctttcctcgttgcacattttgaatgaacagcataactaggacaaagagaacatgtatatgctccgtagacccaatcaatcgtcctacgacaaactccacactcccaatctctctcttcttgaccaagatgaaaagtgtgagagacacgatgatcatgccgattgatgtatatgactcccggtagaccttcaatacaatctttgtgtaccatgagatggcattcataacatacataaggattacggtcaccttccaatccacatgcattacaagtaaaggtgactactcgtaacaagaggttgaagctatgcttatggtgctttggctcgaaaatagtgagtggtggtagattcaccatacagtctagatccatgtttacattgcatatcgtgcaacgagcatacaaagacgtcgtcgaaagatcaattttacaaaaatgacaatcgtgatttccattgatgaagatcttgggaaagtgactgcacggaagagctcgaagatctctacgcattctatatgcaatgagaagccacactcaatgcattggcagaccaagctatcttcactttcttctgtttcgcacaaaatgcaatgaatagaagaggcattcgtaaataatagaggatgatgatgaaaagacatgagttgggttatggtttctactttggattcggtagaagacattttgtttttcaccaaaagaaagaaaaacatagccgaactttagtttgagtttttatcttatgagggctcctcttggtatatatatacttaatttccttgcattttaattgatttttttaaagacgtcgtcgaaagatcaacttataaattcattttaattgatttttttctttgtattttatattatcaatggtgattgaggggacaatactgcatggtgccaactaattcatataaagaaataatatgcaagtttcgaggttatatccttgtatttgtaggtattttcgtttatatatggaaaaaaatactcagctacaccaactataatagaatacatggtcacacatatacgaactatatgatgacatgtagtcaacatcacaaacatttttttccggtatatcaattgtcgaaacccggtgttgaccatcattgatcggtattgaccaacaaaaatattcaaaaatatgatttttattatttttaatattactaaaacaaattattctattgaatggtttatggtattgtagaataaataaatacatactatatttaacaaaatatattttgtataattcttactattatttatttttttcagtttcaaaactaaattaaaaaggaaataaaataaattttttattaacaatgtaaaaaaaatcaattcacttttatattacttttgaaattgaaaaaactatctaacaataataatcaatgtattaaatagatattcaaactatctttatgttgaatatagaatatgtttccttttaaattatcaaacactataaacgattcaagagaataatatatatattttttttatataaatattttttttgaatatttttgttggtaaatgtcgatcaaagatggtcaacaccggattttggtgattggtataccggataaagatgttcgtgatgtggatatgtaatacatctagttcatgtagttggttgtacatttcaaaagttggcatatataatcatgtattccgttatatttagtgtagctgaaatcggacgacaagaaaatgttgagaggaaaattttgaaaatttgtcaaaatacaattaaattaaaacgattttgatatagtttgcaaaagaatatcaatgcacttatattatacacaataagtcaataacaaactcgatctattatctgttgcgattaatcaaggtgatatttaattcttttttttcaagtttgtatgagttggcaatacgtggaaacagctgtgaaatgatgataatatatgactttctagtatatggacttcctaggcacatgctagattaagtcaatatgggcatatgtattgagattaccaaaatctttgtttaattttttcagaatttgtaagcaaaataaatagattggttttcttggcctgtcaggtactcccattagcctattaacttctggcgtaaattattgaactgatgacaccatttgtcaactacgcatataagattctttacattttggtagatctattatatgaatctgcatggtgccttctaccaacgaatctcactgtcaattgagttttacatttttaatatattaaacattttctttgtaagaaaatcttgtactttctactgattttaaaattttattgcttttttacaatctcttacaaatgccacgtatatagggttcaaaagcaaataaaatacttggttctgtgccgtttcataatgttttaatcataagagagtttgtgtgtattaatttttttacaagagatcttgtctttccacatgtaatagaggttcggggattagtcctaaacccttccataggttgggggatttaccctaagttatcaaaaaaataaaaaaatatgtagtagaggtcatctgaagaaggtctcccgttatcaacgataatctagaaaatatcattcggagtttctactaccattaaaaattaataacttcaaatcaaaaccaaaagatttgtaagtatcataaaaaaatatccattagatcaaggataaaggatatatacaatatttaacatttagtcattgtgtataaaaggtctcgtgcataaataggaagacgtgaccttaggttttggtgagcctcaaggaaagactgttgagcattttgagagaaagagagtgatttttaaattggtgttaatctaagtgtttcaagttcacttaagacttgttagacttttctgttgtttgtaaaatcttttagagtctttacaagtttagctaggtatgtttaggctcatttgaaaaatttagaacgttttttgagcaaactgagaagttgtgctgaaaaaaacaactcggagaccatatttatagatggtgtcgatcaacaccattcatagatttcggccgacaccggtcgtggacagaagctttagacaattttgaagttttgaagaattgcaaatatgccttgaaatttttctctatttgcaaactaagctcaaatcgtgtttttaacaataaataggattgatcattgtttagatttaagttttattctaagttttattctaagctttattttttagagagatttgtagtagaggttagagagaagaatcgggtttctttaagagaagattcagaattgctttatttgttttattgatttcttaatgcaatctatgttattcattatgtttgtttcattcaccatatatgagtatatattttgttaggtttagggttttcaaaagtttatgatgaattgttaggttgttaatttgttaggattgaatcaatggagttcttcatctagattgtgtttattactaattctagattcacgaactagaatctgatcttcggttgattagttgaaactagagtgtaactgattgcctaaactatcttagatgagcaaaataactattcataaagagaattgggttaggtattttgtgaacaatcaaacctgcaattaatgcttgtttgaattgaggaatttagcaaagtgacttggaattttagatttaggcatagatagtcatcacaacagagctggttaattttactaatgtgtttagagttcaagattggatcttaataacaaccctgataatctatttaatctgcaattccaaattacctaaaatttccctaactctaactctttttccaactgaatttagctcgattttaattactagcttattttaatttacaatctttctgtttaacgttttttcaaatattgatagtttattgtgtaaacttgagaactttgtagaattcgagcctaagtattacattttgatctcttaatttgagagagtggttcaaagggtaaattgtgcatatcagttatattatgcatcacaacgtctacatgagacatgacacaaattgaatcattggactagattcaatttgtgtattgtagaggtttggatcctatcattgatcctatatgaatacaaaagatagtttagctaaactctaaaaaattagctatcgaggactaagaaaattatatacttctcttcccgaattgaatctctgctttcatcttcctgatgaaatcctcacatttcttgttcaaatcttcgacacttagtaaactatcatttatctcttcgtcatcatgatgatcatctactctaatgatagcgaggtcttgtactaatatttcctcatctacctcaacaaccaatgacacttcttcttcttcgattcctctaaataaaacaactcttcctccttcttcttcttcttcttcttctttagaaacactcttttcttcaagtaatgccactaccttcttgagttttgtttctttcaagtctttgatccctacttctttcgtttgttcaatgatgttaatggctttaccctgcgaaagggattcagaattcccatggaaactccccaagataaagcccacaatcccattgcataacaagaacatgtatttcttgtccacaagattgctatacattgaaagcaaatggagtctttgctgaagagaagagattaaggaagagtaagatagtataaatgagaaaatggatgccaatgctatgatcttagttactatttttatctccttcatctttcttcctagcttttgggattccatctctctctctctatctctcgcttcctctccccttttagttgagaaaaacaatggtgaatgataagcaaataatgttgatttagaagaaaacaatctgatgaatgacaagtttgggaacccatttctctttatagatgattgggtaggttgagtttgatttcatcattttaactaattttcttttggtttaaacagttttattttctcctttgaaccattcaaaccaaattaatctttaattcttcctttttgattacttctgtttacttctagatcttaatacttacttagctttcttttgttaagaaaaaataactaattgttttcgatgatataagagataacctttttaatactaatgaaagaaaataacttaagtagttaaactctacttaaaatatatattaaggtaaatgtcttacgtttatattttataaatcaaacgttatccctaatgcaattgaagtttttttttatatatataatgaaaatagtatttgtgataaatcagtttataacaaaatgtacttagaacttgctcgacacacaacttgaaacggtcactatctataagctacttcgacgaaaattcttgagttcgtaaattttctttttgtcggaagcttcttttgtttgccattgaaaatgtcattaaacacgccaaaactaaaagaccattgacttgatttgtgttttgtcacaaaaggccattgacttgatagatgtattaaaagtcattactctatggatgcatgtcgatcaatgtcgcgtttctaaaatttcctctttgttaggttgatgataaaaactaaaaaggtgaaaatgtttcaagtgaaggaaatagattgggccatcattattgttgggccacgaaaagaggtatatggtgtcaatgagttaattatggtttccaaagagtaaagaaacaaaaataaaagatagttgacgtcggtgaaaactttagaagaagacggataaaatatggttataacttttagcctttaggcgtgcatatagagataaaatggagcgataggatttaagaagatattgtacgtctgcatgtcaattatctaacaagggtgtccaagtaatgccgtgagaaatgggtttgtaattaataggtcatgaggtaaagagaaagcaaagccactagctcttcaatgatatcttcttggttagctaaccaaaacaagggattagagaattaggttaggaagagatagttttgggtgaaagggaaaaatatgtgtaagtgttaatgatagagtgaattattttcgttaatataggcagaagactaaattttggctaagtttagcggaacaagttattatagttttccgcgtaataaaattatatattagtgttaataaaatgttatagtagccaaattatgtcctaacgtttataaaatgttatttatatgaaaacaaaaattacagttaatcttgagtaatctgtgttaggccgttacgctatcaatgtatatttttctttgtagtatcttgtgatttaatttgtaaccgataaaaatctatatcaaattttagcattacgatttcactcgtcaagatttttccgtaaagctttagcttttctaaagattttctctttcaagattgataattgagaaatgagaaacaaagataatcacgaaatggtaagagcactacaatcattacatcgacaagtttattagaaaatcaccaaagataaaattacgacgactagtctaaaataaaactacaaagcaaaaggaaagaaaaaaaataatattaaagagaaacagtagacgaactagtttatggagtagaagcttgacggattcttagacaaactgtgagagatgggattgatagttctgaccttagagcgaagttttatcgaagcaaagatgtgtccgatcactaatcgacaaaacacaccaagtctatatactattgcgactgctacccaattcagcactcgctcatccggttccaacaaagattttatgggtagaatgtaatgtacgtaggaacgaggacatggatttctccacaaaaatttccaaggccatagattgtccacaagtgaaaacttacgactttcaaactgtgtacttttggaactacccctcttgtatattatgggaaaagttaattttggacataatagagtatggtttagagataaccatacatttgtttcagtaatgtaaaccggtataagataaaccgggttttgccacttactataaaagaaatacagagaacctttaccttttttctttctctcgtctctaacaaacttgtttctattatggtatcagagcaatgaattttcaaaattcattcgattcttcttcgttttttgctttgttctttgatgattctcattgatcttcttcttcttcgatagattcgtttggtttacgtgccggaatcacaaatatcgatcaagttttcttcagattctgttaacaatggttgtaactcgcaaaatccctcgtcgatcatctcgtgtagcttcgtcagctcgaagacaagtgaatcgtgatgatgatgatgagagttcgccagaaattcctccgattgttcctccgattgtttctccgattgttcctccggttgttcctccggttgttcccgtttatacatcatcgattgataatccagatagtattcattctccatatcatctttctaacagtgataatcctggaatttctataatttctgaggttcttgatggtacaaattatgatgattggcatatagcgatgaaaacttctttagatgcaaagaacaagattgcttttattgatggatctatatctcgacctagttaaacaaacgctatgttcaggatttggtcacgatgcaacagtttagtgaaatcttggattctaaactcggtttcaaaacagatctataaaagcattcttcgttttagtgatgcatctgagatttggaaagatttggccacacgttttcacattacaaaccttccaagatcatatcaattgtcacagcagatatggtcactacaacaaggttcaatggatcttgctacgtattatactactctgaagacattgtggaatgagttggatggcgctaattgtgttacagtatgtaaaaactgtgattgttgcaaagctatggaaacaaaatcagaacatgctcgtgttattaaatttttggctggcttaaacgaatcctatgccgtcattagaagtcagataatcatgaagaagcatattccagaacttgctgggatttacaatttgttggatcaggatttgagtcaaagaaatatcactcctgttcagaatgctgtagcttttaatttttcagcaatggaaccaactcaagcttctgttaatgctacttataatcattcaaaactgcagcagaaagtgatttgttctcattgtggatacactggtcacactgtggataagtgttataaaattcatggttatcccataggatttaaacacaagaacaagaatgctcaacaggataaacagattgttcctccaaaacctgttgttgctcagttagcttttactaatgctacttcgagtgatttgttaacaggaatggcaaaaactctaacaaaagatcagattcaaggggttcttgcttatttttaaggaaaactcaatgatggttctgtgacatggcttctccatctggtgctacgattactgcattacctggtatagctttttcttcctccacattacgttttattggagccttgaaagctacaggaaatgttttatcttcatcctcatgggtgatagatagtggagctacacatcatgtgtgtcatgatataacattatttcagacattatctgaaaccatgaatgattctgttaccttacctactggttatggagttaaaataacaggaattggttcagtggagttaagtgatcatatgatcttgaagaatgtgttatattttccagactttcggttaaatttactgagtgtgagtcagttaaccaaagatttgggatatcgtgtaagttttgatgaaagttgttgcatgatacaagatcatatcaaggggttgatgattggtaaaggggaacagatttcaaatctctacgttttggatatgcaatttctcgtgaagaattcaactcaaccacttgttttttctgcaattcttgttgactctagtttatggcatagtagactaggtcattcatctaatgtcaaaacagatcttgttacagatgtacttggtttcaaacaaaggaataaagatgattttcattgtgttatatgtcccttggccaaacagaaacgattatcatttccatccaagaataacatctgtgaatctgcttttgatctcttacacattgatatatggggaccgttttctgtttctacatcataaggatacaaatactttttaaccattgtggatgatcatactagggtcacctggttgtatttgttgaaagcaaaatctgatgtattgtagatattccctgatttcttgaagatggtggagactcaatataagacagtggtgaaagcagtccggtctgacaatgcacctgagcttaagtttgtgaatttgttcaagtcgaaaggtatcatcgcatatcattcatgtccagagactccagaacaaaactcagttgttgaacgcaagcatcaacatattctaaatgttgcaaggtcattgatgtttcagtcacgggttcctgaagagtattggggagattgtgttctcaccgcagtcttccttatcaatagacttcccacaccactactgaagaataagtctccttatgaagttcttacttcaaagaaaccaaaatacaggcttacgtgtctttggctgtctttgttacagttcaacttcgtcgaagaacagacacaaatttcagccaagagccaaagcttgtatctttctgggatatcctagtggttacaaaggatacaagttattggatttggaaaccaagtccattcatatttcaaggaatgttgttttccatgaaaccagatttcccttcagttcaggtgattctgctggtcctttctctgatatttttggcagcataaatgaatctcttattgagaatgatacagaaattgttgacagtaacattcctgtagttgtgagtgaggctcctattttgagtgaacctcttacagttgtgaatgattctgtcaatgattcacatgaggattcagctccgaaatcagttcctacaacttcaacctctcgatctaaaagagagagtaaacaaccagctcatttgaaggattacttttgtaatctatcgagaaaaggagttcaatatccactttctgactatatgtcttatgatcaactttcaactccatatcgagcttatatctgttcagttacaaagttttcagaaccttcttccttttttcaagctaagaagtctgatgattggattaaggctatgaatgcagagttgcaggctctagaaggcactgctacatgggagatttgttctttgccttcaaataaaaaggccattggttgcaaatgggtttacaaggttaaactcaatgttgatggaaccttagaacgttataaggctcgtttagtagcaaaaggctacacgcaacaagaaggagttgattttgaagataccttctctccagtggcaaaaatgacaacagttaagaccttacttgcagttgcagctgctaagaagtggagtcttcatcagctggatatatctaatgcgtttcttaatagggatttgtatgaagagatttacatgaacctagcgccaggatatacaccaaaagaaggagaggaaatacctcctaatgcagtttgcaagctaaagaagtctctttatggactaaaacaagattcgagacaatggtttttgaagtttcgttctactttgctgtctctaggctttcaacagtctcatgctgatcacactctatttgtgaaaaaacaacaatggcaggtacattgctgttcttgtctatgtagatgacatagtaatagctagcaacaatgatgaagaggttgcaaatctaaaagatgatttgaagaaagcttttaaacttagagatttgggatctttgcaatatttcttcggattagaagttgcaagatctgcctcgggtatatctgtttgtcagaggaaatatgccctggatatcttagaagaaactggtatgttggcttgtaagccatctgctattccgatggaaccgagtatcaagttagttggtgatggagctgaacctgtcattaatgattcggcttcttatcgaagattggtagggaaactgatgtatttgactataactcgtccagaaatcacttacgctatgaacaagttatgtcaattcacttcagcaccaaaagggtcacatatgaaagctattcttaaagtcctgcaatatataaaaggcacaattggaaatggcttgttctattctgctacttctgactttgttcttaaaggatttacggatgcagattgggcttcatgtcgtgattcaagaagatctacttctggctattgcatgtttttaggtgaatcaatgatctcttggaaatctaagaagcagcaaatggcgtctcattcttctgcagaatctgagtaccgtgctatgcaatatgctgtcagagagattgtgtgttagttcatctcttatctgatcttcaagtacctcaacatgctcctgtggctttcttctgtgattctacaacggcaatacatattgcgaacaattctgtatttcacgaacggaccaagcatgtcgagctggattgtcacatcgttagagacagaattatgagtggtccgattaaaattctacatgtgactactatcttcagctggcagatgtgtttaccaagtctctgtacccgacacagttcaagtctattgttggcaagatgtcattgaagtacatgccatcttgagggggcataatagagtgtggtttagagataaccatacatttgtttcagtaatgtaaaccggtataagataaaccgggttttgccacttactataaaagaaacactctgtactattattacatttaatgagaaatacagagaaattttacctttcttctttctctcgtctctaacaaaattgtttctattaggacaaaaacgagagatttcgagaaatattacctcccacattatttcgtaataggtcgaacgtctcaaagattggtgggatgttgcagcgtaacattgttgtcacgacccactaaaaatattatttttgataaacactaaattttaaacccatttctcacggcattacttggacacagtactctatttgtgtctacaactctacttctcttttgtttttacgattctcgccatcgcttttatttctaaaggtttgggttatgtccactaaaacattgatccattcttttcatcctttagttaattttcatttagataatactccttcagtttcttattaattgattttttagaaaacaatttgttgtaaaaaaagaagagttttttaggttttcaatgcactacttattagttattattgatgaattttaaatttcaaaacaaatcattaaatatcattggtttaaaattataaaaaaaatggaaatcacaaaaattaaaaaagtttaactttaaagtttaattattaaaaagagtattattttttagtcaatttatttcgttggtcggttaaatgtttacgtgtgattcaaatatctttttgatagaggtgaccatgatattaaaaaattgtttatttgttttggtaattttataaaagattaattgatatcaaacacttttattaatgtgtataaaacaagtaattacaccagactgcatattcacatttaaaatgataaactaacaaaaacaattgagtgtactcaaaacagttagagtttcatgcatactcgtaagtttaagatggttcctaactttaagattgggccatattcgtaggtaaacaacattcctttcgagaccattaactaaagctttggttaatcaaaagattagttggataagtataattaatcagattcatagtttcaaggttttttgtagcctatattgcaaacaataggcaacctagatataggtttgcatctggccgacaagtggcaccttcttttttgtaggaatttcatttttcttctttgtatttgcatatatataatgatgcgttaactatcacaaattttttaaaaaaaaaattgatttagtctttttatgtattatcacttaatagtgtttatttatatctggactacaaattcaatagcttttagtagttaagttccatagtttgtaaccatgatgttactatataaaatggttacaaacttaaaattattattctacattatacttttaagacatgactaccaaaaatttatggatattatttaagcgctaattaacaactaagtatacacatataaaatgtatggatcatggcaagtatatgtgatttgtttcatattcgaatttttttatttcatactagctttttattgcttcgaaacattaaagaattcaaatttttgaacaaaacaaaacgaatcaacggataatttgaccaccctgatattgataagtattgttgtcgcattatctttggtttttaaacttactataattgtataatcttaaagtaagtaagatgacgcccgatggtggcacatggcttaccaactctctatgccttggagagtgtacaaagttcaaagctcaagggttttgtgactttgaagtctccaagagaatcagtttcagatgctcaagttcttattataaatgtacttgtttaggttatatttttttgggtcaattaatagatatggatggggaatattgaagttaagtaaaagatgatgatgtaacttctgctattaaatattgtgaagttatttaacaaaggtgtagattactttttcttataagaaatatcattgaagaaatttctaaaattagatgcattatttttcaagaggaatgcatagtaatacattagagtaaaactagtcgaaattatataattagtgggtaatattttggaaaatcgggagtagtgagtgcaggttggagctgttgttgcacctcaaatctcgaagcaaaacaaacaatgtactggtttctggttttctattttcattaatataaccaatcttgcatttacctagggtggtattactattaatagcctttcttttttgatgatattcctaaataaagttacaaagcactttccgactaagaatccaaaccctagtacttaagttcttatacatcaacccacttggttttttttttcttcttcttttttttctagggtttcatattatttgagagttgaaatgaatcctgagaataacatagaagaagaatacgttttgatgagtttggcttcaattttgttgaagagacctttttcatgggtctctctcctcgcccctccacttcttcacatccttggcattcgcttcttacatctcctccttacttgtactgctttgttcttctcctctttcttcttcccaatctcacttcctcattcttcaatacaatcatcaaaacaagatcaagatcaagaaggacactatattgccaccaaagatattaccgggaaatcggaggaaaacctggagaagaccaatgaagaggatgacgatggcgcaatcccggatgatgagagcctcatagagctgtctttaccgagtggtcactaccttggtcaccactacaatagtaacaagaaccatctctatatccacaacaaagtacaagatttcaggctctttgatctattgaatgaaattaacgattttaccgaagaagataatctcattgaaatcgatatctccatcggatccattaagtattcaaggtttgagatcaaagcttgatgtatatacatccaatgcttttttttctttctttttgtgtgcacaacatccattttgctttcttacttttttttcccatgttggggatttcgtatcattattatctgaataaaactcggatactgcaaactaatttttttttaatttttttttttgcacttcactgtgctctttgtttttttaatgttgttaatttaatttggtttatggattatgcctttgttataattattatctctactgcgtttgtctaataccatatctccaccaaatttactaagcagtactttcctatcatcacaaatacatttctctttcatttgccgctagaaataagatttggtacattaataaatgtaattgttatcaagttttcaattcaagtaattttagtcaccactcacatttccattgtgtgtttaaagattggagggttcagagttaatccggtattgtaatatactttataaaccagtactacttctcctccatgatcggcataaagcaaacgtctcgaggtatgtcatttcacggagagatgatgaaatagtttcagaagtacagctgccagtgattagtgaagtatatatagagactcctaagcctagtcaaagggaagagatctaacacaaaaaatcagaaagtatctaggtgtaagagttctctattcctcagaagaacttgaaggtttcatcgacaacaaatttcaagaagagcaaacatgagcggaagttcaaaggaaagtgtcatcattgtagcaagattggacacaaagctgatgtttgcaagagcaaagccaaggatatcaagagccagacaaacctaactgaagaagatatggttgcagtggtcactgaaaatataacatagtggaagacaaccaagtggagtggtactaggacatcggtgcaaccgcacacatctactctgataggaccatgttctccacctatgtgaagaacaagtaaacccttcatgggtaacacggcgatgttgaagattgaagctgacttcaggacgtgagcttattctgtaaaacgtgaagcatgtacctgacatgcagaagaatctcatctctggaacagtgctaagcaacaatggctttaccgttaactttgagtctgataaggtagtgattaagaaacatggggtgtatctgagaaagggttttgttaaggctggactggtcaaaatgtctgtaatgacagcaggaatctggattagcccagaacatgtgtgtgtgtggggggggggggggaagctttgcttaccactaactacatcctcaacaggataccacataaagtgactacaaagtcaccacatgaactttagaaaggcacagtaccttcgtacaaatacctaaaagtgtgggggtgcctagcaaaagtggttgtaccacctcccaaaaaggtcacaatctacctatacatttttgcagccattttgtgaaataaatcttgtagttgagacttatttacaatgactgccactagattttaattatttttttttaattaatggtttgaattttttatagcaattaattgggtaacaaacaaaaaatattcgaaatatatggcaatcccatatgtcacgcaaaatacaataaattatctttttcttatctcacctacgatattcactaaatcttaaaacatccaaaatttgaactatttgaattaactgtattaatttttggcaataaattaaaacaaacattgtaaaacaaaccaaaatacatttgcgaacccgtaaaatgagcaaacccaattacatgtgcacctaaaaacattccttatcttggtttgaatattccatggaattcaaaattccataacttttttggcataaaatcacaatcacaactaattccatatacacgatcttaacctcaaaatggtgcacaatcaaatcaaatcttcaaacaaaggaatatcctcaaaattccagctcttaacttactctcatatacattattaatatttaaacttataaataaaaaaaagatatcatgagaaatatagcgggacgtgtttgaattgatataaaatatagcggaacgggttcggattgatataacacaagttaaatttttattttattattttatcataaccaatttttttagttataacattaatataaaattatataattttaatactatattaaaaatagtaaaatttaatattattatatatatgaataaaatatttgttccgtggtgtaccacgggttaaattctagttgggcttaagaccgtagactgtatcttcatcggatatgcgcacaacagtagtgcttatcgatttttggtgtataaatcaggtattccaaatatccatgaaaatacagttatggaatcaacaaattcatcgtttttaaagatgttttcctttataaaaaagatcaaaaacgaacttctgaacaacgagatgcagcaacctcggaagctgaagacaatactttgggtactattactgttgaagaaacagaacaggaacttgaagaacatcctaggcggatcaaaagagcttgaaagagaaatctttatgtgatgatttcttgatggcgtttttagctgaaaacgtaccaaaacctattcagaagcaatgtctacccttgatgcaccttattggaaggaagcagtcaatactgaaatagactctattttgcaacatcatacttacgagatagcatatctaccccaaggctctaaaccattggggaagaaataaaattttcacaataaaaaagaaaacgaatggtgatattgataggtacaaggctaggcttggggtacaaggatttcgacaaaaaaaaaggtttagatttctttgatacctattctccggtaacgagaatatcttcaatcaagatgctcataggcattgcagccttactagatcttgaaatccatcaaacggatgtaaaaacaacctttttaaatggagatttggaagagaaaaatctacatgaaacaacctaaagggtttgttatcccaggacaagaacacaaagtatgtaaacttgtgaagtcactatacggactcaaacaggctcctaagtagtggcatgagaaatttgactttgttatgatgtctaataattataccattaatgaatattacaaatgcatatatttcaaaattactccaatatggtacattttgttatgtttatatactcattttggggagcaatacagatatcataaatcaaactaaaaacatgctcaaaagatattttgaaatgaaagacttggatctagcaaatgttattttggttataaaaatcatatgaactgatgaaggccttaccttgtctcaaacccactatgctgagaagatacttgatcgtttcaagcattcctcaaatgggattgcaaaaactcgagtagatcctcaacttcacttgaccaaaaactcgggtgaacctatgcaacaagtagaatatgcaagagtaattggcaatttaatgtacttgacaaacagtacaagaccggatctaggcactctgtaaatgtacttagtcgctacacaagcaatccagaacataagcattggaaggctataactagatttttgaactacctacgttataccaaagatcatggcttacattattgtaaagaacccgcagttttggaaggttacagtgatgccaactggatcgcagatttcaaaaactttaaatccacaagtggatacatctttacacttggaggtgtagcagtatcttggagatcttgcaaacaaactgtgttagccaaatcaactatggaatctgaattcatagcgttcgatacaactatagcggaagacgaatggctcaataatttcttagaagacatcccaatgtgggggaaacctgtgcccacaatacgtgtgcactttgatagccaattagctataggcagggcacaaagtaccctatataatcgtaaatcttgtcacatcagacgacgacataaaactatttgacaacttatctcaacttgagtaatcacgatcgattacatcaagtcagctgacaacctagcggatccatttacaaaaggtttgaatcgagatcaagtttcaagatcatcaagaggaatgggtttaaagcctaccacctaagaggaagtttgatggtaaccccacctacaaagattggagatcccatgacacaagttcaaagagacaactaaatcaaactaaatttgttaaagcactgagagactgttgtctctttctagttcctaaaatgatgtatagtgcttcgtgtatgtgtaaaggaaaaagcattgcttttaaagatttgaacctagctttgtaagatttgtgaagtacttacaagatacttctttaaaatacaagcaattagaaaatcatcttgtgagtgtgaaatggggccgtttctagtagaatatgtgaggctatactctccaagttcactcatgattaaaaaggcatgttcaaggccacagtgaacacaaatagagaacctcgttctaagagaaaatgaagttgtgttatacatgttgtctaagtttgcattaaactctggatggttcaagacatcatgttcaccataaggccgagtaaactcgataggtactaacaatgagtaggttcaaagctgaaaaacaccaccaactcagacacagttagttttcgtgtatactctcgaaggtctatctagtctagctagttggattagtccatatgattagtaaattcgtcatatgtttagacttatttctattcatgtgtgggattgttggaaatttttgacataatatttttccgatgactttccggccaaacggctgaacggaattgttgggtcgttagtgcattggaaagctggtaaagagtactacaaggtggtatactcatacgtcaaaaatgaagttgtattgaatgagaaataaaggtgtaaagtgggaaactttggccaaaccaaaccgaactgaaccgggcatgtgtcgggctgcggattgtagggttgtcacgacgctaacttgaaggctatcgggcttgtggaccgtcatgcgtgtgagttattctgcttgttgagttgaatcttatggaaatattcaatattctcaaaatatgtcatattctcaaaatatgtcatattctcaaaatatagtatattctaaaaatatgcaatatcttgagaatattctcgaaatatgccatattctaaaaatatgccatatcctgagaatattctctaaaaatcctatctccctctactatataaagaaacatagcctctcattatttttcaagatcggaaacacaaaacactctaagttctaaagtctatgctctctcttgcttcttaaaagtaagttcttagtttagtagtttcgagattatatcgtagatcaagtttgcttgagtctaatactcgtgtgctcgggtattagtttgtgatcggatgtatcctgacattcataaatcgtgattatccaaaaagcagttacggtcgatttattgaattaaagaaaaatatatcatatcttttctccgtgttttactttttgtctttatttactgttgttctaatttattattgttatcgttgtttcaaataaatttgtacttgtttctcaattcggtttttgagctcttacaatctcaattcaataaaaagtcagtttttagcttattgctctagacggattgagaattttttgaatttattttaaaaaaaattctaaatcttctaaaaatagttttgctattatctttgggtgcttacgcggaaggtgtatcgaagaacgtttttacttctttctttctcctctttctaactgatttgcaaatgctacgtagcgattgttgtggacagtgtcttatacaaacatctctagtttccacgaacgctcatagttgagtgagtttgtgaaacgtgaaacaagtttctgcaaacgcttcttaagctagtttgcaaaactaattcggtgtaatttagttacctgaattttttggttaatatactaattagatcagtttttccgtgaacaaaaggactgggatcaacaccaacagcgaggtcgttgacacccccacagttcttgagactccagatgagatagctttgcatcttgcgaaagaacttgaaaagacacagatcgacgattctggtatggaaaacatgcgccaaaatctgttcagtaatggttcaacccacactgccataccaccctctgcttcccaagggatgatgctatacttgtttgatggcaaagccgggttcaaaacgtggcaagacaagatgcactactatttggtcagcataaacatggaaaggtatctcacagaggatccaccaacagttccgcaaggtaccacaaatgtgtatgcggttggaagtatgaatacttgggctcaaggtgactattgttgcaaaggtctgatcctgaaccgcttggtccacgatcggtttggcctctacaacaaatccaagtcttccaaaacactatggttggctttagagaacaagtacaagactgatgagtctggacggcaaagattctcaactacgaagtttctgaatttcaagatggtggactccaaacaaattatggaataggtggaggctcttcaacgtatcttccaactcgatctgttcacctcctcctgtgaagagcatcccttttattttgtttagtatattctatgttttttaattgtaatattgtcttttataattgttttgatatatgaatttttgattttgcaattttttttttttaatgatatttaatccggtctcaccaatacaaacgtatttattaagaatatcataaaaaatctcaaacaataaacaaatattataaataatattaaaaaattctttatgatactatataaatatcacccatgttcatgctcttatatttacgaaagcaaaaatatgtgatgtaaatatttagtggccaataagtttttaaaaaaacacatatgaccaaaaaatgaacataatcacaggtcatgtcatggaaaaagggttatacacacaaaatatcttagtacaattatatattcttccgggttggtctaaaaacacacacaaaatatcttagtcctatataagacaagttaaatgagatgtgttatgataaccatctacgctaaccatctattagctcgatttttattttcaatttttgacccgaaattgaattagtaggacgtttctattattgcctttactcctacaacaaagctaaacaaaactaacatttaataaatcagtttaagaaaatatcaatcgtatctacggttataacaaacaaatatttgacaatcaagttgtttcctattataatgcttacgattttgattatatttattccgttgtttaattctagccaattataattaagttaaaaagattttgtctgctcacaaagaaaacaaaagacaaaattacgcgacatgttacttgataacacgaattttgatcgatattaatacaaggtgtataacacgggtgaaatcctaaaattaatagtcacaatacaattatataattttaaaaaggaaaacaaaaaattatataattatacagaacgtggttagacggtaagacggaatttgatcgatattaatatgagacggtatacagtgggtgaaattctataattaacaataaaaatacaattaaaaacaaacaaaaaaatattaataaaacaattacaacttaaatttagttataaattaattagctcgggtataccgcgagtagggatgtcaaaatgggtaacccaactcaactcaactcataatcaaataagtttagggttaaatgagttatggattgacacaacccatttaacaaaatgggttgtgtcaatccataactcatttaatttgatggattaaattgttaaatgggttaacccatttaagtaataatttaattaattattataaaaaataataaataattatcattattaattcattatcatcaaacttaggatatttacggattccactttttacggatttacgtttttggcgggaaaatcacgggtttacgttttttggcgggaaaattaagggtttatgtttttggcgggaaaatctcgggtttacgtttttggcgggaaaatcacggatttacatttttggcaggaaaatcacggatttacgtttttggccggaaaattacggtgtttacgtttttggcggaaaaatcacggatttacgtttttggcgggaaaatcacaggtttacgtttttggctaagataccacgctcctaacagccgttacaaaacatggcctaacagccgttatcgttggtttaaggacgaaaacagttgttagttacgctgttaggagagctgttaagaattgttaacaatgagtcgatttggccgggtcaacgataacttataggttaaattagaagtcaactttttgttgaggtataaaacggccattacagtgtcaacaagatttgaaagcttgagaggaagctttatccgaattcccctttttccctgcaaatccatgtcccaaagtcagtcactggaattagaaaccaatggagaaaaccaaaaccaataacctttgactccagaacagctagcttgagattctcatttaggatcaaacttgacattcaaacacgaccacattaaagaaacattggaaggctttgaatctaaggtgttctgttaatacctgatccttccatgccttaagtgaatcactcagagttttggcaaatgtctcagcatctatgggttcacactcttattgaaactagaataaaaaggatacctctttttggtagccaaagaaatatattatatatgaagttgtagtgaggaaatgatggtaaattacataaagaagtctccaatcgttgtacacacgagactggtgcttttattgaacaatggacatgaaacaacgaaacataaacacgttctgaagaagggtttttcaaccagaggtggaggctaggccacgcgttgcgttgaggaggttggcgtgatcggtgttgcagtaaagatagctctctttcccagatgaagtcgtagtaaggactttggagaaacccatgtattccatctcctgcaatctcttcaagcagatgttcgccatgaacctaaacagttctttcttctggttccagggttggtttacgtattcttcaattggcatccactgagaaagccacaacaagagatctaagcagttaaaaaaccatccttggttcaggttcatcaaaagatatacaatacaagacgttttaccttagcagctaagatctcagagtcttgtttcttgatttcaaaagtggttggttctaactcacagaggaaaaatatatccgtttttatttccaagaatgcttggtggctttccctgcgagaggacattaaaatgcagtcaaggttaaacagatcaagaactcatggatacttaataaagatggcatgaagataatcttgttacctgaaagccaggacttctacaaattttgtcttaatctgaagcaaaagaccataagaaaacatgaattagattacactacatcaatagaaaacccaaaaactggatacgtacaccagtttcttcttccacttccctaagtgctccttcccaaatattctcaccctgtgaaatgtcacttggcttaggtatgatatcagagggaagtgcaaaatcataagcaaaacaacgagaggttttttaacaaggtgccaaaatcccataagctcacctctttaacaacaccggtaggcagtttccacactcctgtacctttgaaatgaccatcaatctcctggaccacaagcaccttcacatggaaatatctcgttaagttctgttctcatcattccagaggtcaaaatacttactaggcaatgaacaaacagaagaccttaatggcctctctagtccagtcactggctacattccaccagaaatgcttacactttttctagtgattttgactctttatcaagccattgggattgaaagagatggaccaagaaaagaagacggtaaagagttgttacctctttggtcttcttgtttaggacaaaggcaccaactccaatacgatgagacgcattggcaggaagagtactaggaacatcagcgatccaagatgtaagcatggtgtattccctctcggcatggtggcacacaaacccttcctgtcaaattaccaactaaattgctgaacaagaaccaatccaaaaccatagttacaaacataaacatcttacttactgcttttgcaggtgcaataagattgtcaagcccatcggcaagctttaaccatatccccttcgtcccctgcaaatacatgtctcaactcattgccactagactacaagtgtcttctaaagagtctctctaagtctcaaatctgaagtggtctattaatgaaatacctgattgctccaatacacaagtgaagctctcagctttgggacaaaatcctcaatagtcattggttctgtcaagttcaccttaacacctccataattatctggaaccccttgaagtaaaagggactcctgatcttcattgtccatgctacaaaaagaaccaatccatattctaagaaaacccaagttcccaaaatcaaatgtgagtaagaggagacataccttgaagaaagttgagttatttgtggtattggaatgatttcgaacttcaggttttataacaagaagctaagagtttcagccaagagggcgacttaaagagtagacttttaagaatttccatgtaattgagttgctatagaaacaaagtttcaaactttgttgaaattacatggaaaagaacagaagcaaaatgagatgagattccaaactaagggttttggggttttcaataggtttgggccattttgctctgtcaacggaacagtcactctctcttaagttacagagcgactttggaaccaaagaggcacatttgggtcttgcttgcattttcacaatcttgaagacattggttcgattttgctaaagtcaaaccgaaatgttttcggtctagtctggttttctgtcaaaatgtattttttccataatatgaagaaatgatttaatgtaccaaaacattagtgtagttgtagtctttgaattaccattttattaagttatcggaaatagactcgcctctagaacaagtctagagacgtgaagggaagcttggacatccaatgttgtatatcatatagtagaggctctatcaaggaatgatcgaatgtcgtatagcacagcattttcacaatcttgaagacattggttcgattttgctaagactgtttaagaaccaaattaagaccgaaattttccggtctaatcaggtttagttttccactggtttggttttctgtcaaaaatgtatttttttctgtactctaaaatataccaatcaattcgttactgtagggtttaaaaaaaatatatatatatatcagaccaaagaaaaatttaaaaacaaaataattaagagtcttatacaacaagttaggttacaggagaaaaggagaaagagggttaggttaaatagagaaacactttctcaaaagagttgtgaagagtgaagtagaactatgatcaggctttcctttgagaaagtacgcgtggtcggtgctgcagtaaagatagctctccttaccagttgaattcttggtaaggacattggagaaacctaagtactccttctcttgagacctcttcaagcagatgttagccatgtacctgaagttctctctgttctggaataaaaggttggtttatgtatacctcaatcggcatccactgagaaaaccgacaacaattgagtgttaaaagatctgcagtaactaaaaccctccttggatttgtaaaataagatcaatgtgtgactatatctctataccaaactcaaaaatatgccaagatcacatcaaacttacctcttgaataacaccggtaggaagcttccacagtccggtatctttgaaaacaccatcgatctcctgaacagcaagcacctgcaaatggaaatttgttcatcaaggttcaatctaacgtatggttcaggtcttgttgtaccagagaataaagcaagactcagcaatatataaacataacgtagtgaaaatcaatactgatacaccaaacagctaagccaggagaaatatgaagtagtagtaatgtattgttacctctctgttcttgtttaggacaagagcaccgatgccaatacgatgagaagcattggcaggaatagtgttaggcaagtcggagatccaagaactaagcaccgcatattcattctcggcatggtggtacgtaaaccctttctgtaaaatcaccaaaatagaatccgattcgatcactaaagctgaacaagaatcaatcaaaaaacaaaactaccaaatcacaaacataacatcttcttaattaccttcattgcaatgtcaacaagactcgaaagctcacaaggaagctttatccaaattccttttttcccctggaagtccatgtccacaaaagtcattcactgacactagaaactcatgttcaaagaaaaccatatcaaaggaacattgcaaaggattaaatctttaatacctgatccttccatgccttaaatgaaacgtcaagctttgcattaaaatcttcagcattcatgggttcaacttccatcaggtttacttcaacacggccgtatctatcttcttttccaataagtaaagagatctgttgtgcttcactgtccatgctgcagtatctaaggaaaactctctttatcacaacttaaaagacaagaacaagaaaaccaaatcccaaagagaacaactatgaatttcttggattgagattttgagagtctcacaaagaaaacgtaaacaaagaaagtctagatagttttccataaaccattttcttctttctttagtaaacaacaatcaatggtttagagatttctctttagtcttcaatacagctgagaaagtgagaataaactatgaagtatcaaaggaaaaaaatcgtcataaatgtcactagagagaactaaaacagaattaaatcaaccaaaacaaagcctttctcaaaagccgttcgcaagcaaatgtttcttcttcagtacattttatttagaaggaaaccatggtgaattactaatggcaagtctccagtctttggacacacaagactggtgaactttaattgaatacacaagacgtgaaacaaagaagcagaaacactttccgactagtcagagagagaggtggaggcttggtcagctgtttccttcaggaggttggcgtgatcgacgctgcagtaaaggctctttttggctgaattcgtagtaagaacgaagcccgtgtacttctcccgcgacctttttaagcagatgttagctattaacttgaacatctcgttcccctccttgttgtgatagggttggtttacgtattcctcaaccggcatccactgagaaacccacaacaagagagctaggctgttaaaagatcttcagtaaactaattgagattcatcacaagatatgtaacatgttttaccttagcagcatggatctcagaatcttgtttctggatttcaaaagttcttgcttccaactcgcagacgaaaaatatatccgtttttctttgccacactgcttggtgactttccctgcgagacaccaacaatacgatgtcaagatgaaatcgatcaatggataacttataaagaaaggatgaagagatgttttgttacatgaaagacaagacttctacaaactctgcatcaatctgaagcaaaagacaaaaggaaaacacggagtttagattacagtatcaatataaaacccaagagatatatatgtttgtcagggtttgaagacggatacgtacatcagtttcttctttcacttccctaactgctccagcccagatactctcaccctgtggatttgatatattcagttggccaagatatcaaaggtaagtgcaaaaacatacccaaatcaatgactcttgtacagtgctaataacttgtggttgataccatcaagccttatcattggaatcaatgtgtgacaatatctctatatcaagtttacatgctcaaggagccacacctctatgaagtttagcattcattaacttgtattttaccaaagtagtgacctaatcgataaaattacacacacacataaaaagatgtgccaagatccaataaacttacctctttaatagtaccggtaggcaccttccagacatttttatctttgaaatatccactattctcctgaaccacaagcatctagaaatggaaaaaaattcattaatgttcaatcaaatgtaagtttcagctcttgttgtaccagagaccaaaactagagtcggcaataaatacacatcatgttcatgtagagaaaatgcagacctatacactaaacagaatatttgtccagttactattgatatctaaagccaaaaatgtttacctaattgactctactgatatatctcaagcctaaaatgttttctattctctctatttttaacaatttgactctctttcagaccatttacattcaaagtgatggacttgaaatacataagaattgtcttgttacctctccgttcttgtttaggacaaaagcaccgatcccaatacgatgagaagcattgcaaggaagagtgctaggtggctctggaagccaaaatgtaagcatcacatactcattctcggcatggtggtatgtaaaccctttctaacaaaatcaccaaacataatttgatcaccaaagctgaacaagaatcaatcctaaacaaaaattctatccataacatcttctaaccttaattgcagtatcaacaagactagatagctcactaggcagctttatccaaatccccttcttcccctatcccaaaaggccaaagtcagtcattagcaatagaaattcatgtcaatgaagcaaaacaaaaaaaaccaataacattttgacagaaacaaaaagacactatcacaatgtttaaatccagaggtctatatcttaaaaactgtttgagattagcagcaatgattcaaagacgaccattttaaagaaatttggaaagattgaatctttttaatacctgatccttccaagccttaagtgaaacatcaagctttgaatcaaaatcaccaatagtcatggattccacttccatcaagttcaccacagtacctccaaatctgtcttcttctccatcaagtaatgagatttcaaaagcttcaccgtccatgctacagtatctttgacaacaaaacacaagaaaagcaaagttttttgtcaaacccatgtcgcttcaatcaatcaaaacagaacccaaaagtaaatgttagtaagagagaagaaagaccttaagaggaaactgagttatcgtatctgtgagacactttaggtttattatacaaatcaaaggagaagactttgataggattcaagaatttccaggcaatgaattggtaatcgagtaacaaaaaggttgaagaagaagaagtcaacgaggttagaagcaagtgcatattgattatggatcgatgaatgttcctttggcttacaatttcgtggaacgaagcaatcacaaagaaagggtttttctattgagaaatgacgattcggtggttgggccatcaagctccgtcaacggaacagttcttcctctcagacaatgacgaaaaagcacggtgactttaaaaattggaaccgaagaggattacattggttcggtttgcagtgatctcgattctggttttttattagaaccgaaattgtttcggtctattgtttccaatttttataccaaaccaaaattctggttttataccaagtattttgtttccatttgatttggttgtgtaccaaaattcaaatctggtttttgttagaaccgaaattgtttcggtcttttgtctccaatttgatttggttttgtaccaaactgacatatgattatacttaatgaaacaaaacaaaattatatttgacaaacagcatttttttgatatcatatttcaaaaatattataaagggaaaagttgttcaaaaatctatgatactttattaacactttaattaaaaaactttttaagactgtttataaatgcggtataaacaatgttttatttgacaaacaccatttttaagatatcttattttgtattttttttttaaatagaccaaaaacagcggtatcataaaatcggtatttgcggaattctactttaaaaaaaaaaacataataccaaagggggaacgcaactagatgatgaaaccatatgactaaaattatcatgtaaaaaactattaaataaaatatttgctaaatattatttactatataatatattaatatggaagatatattaaaaaaatatatcatggaagattattgataaattctttcatgttatggaagatctattaaagtgagtttgaatggttcatatgatgttaatttattcaattctagtcaaaaccattaaaatgaataatagaaatattataaaaccaaaaggtaaatcatcaatattttgaccaaaaagaaaggtaaatcctaaatataatattaaacttcataaaaaaatgttgaatattttttttaaagaagacaagagatgtcctcttattacggattcttaacactgattttgattactttttctaggtttttctttcttttgaatctaactatattttccgataaaaaaaacttggtgtattctcaagaaacatctaatggccatcacaaaaatgtcatctcttataatactttcattgatgatgttgactttcatctatattcccatgatttcaggtaaaaaatttatctgtttataagtaattatctcatttttttcatagattatcttaagaaaatgatagttttgccacttgagtcttttttttggtggaaatccacttgagtctaaatagtaaatagtagatgcaaagaagaagaaaaaaaattatgtgggggcaataaaaatctttaaatgttctattgactatttttttactgttgatatatgaatcaaatagggcaattcagaggaatcaaacagtgtgagatgaaatgttatagcacaccagaatgcaatgcaacatgcttacatgaaggatatgaagaagggaaatgtctgaaaagttgggatggtggagttgagtgttgttgtctaggcctcctggctagttctcatcaagatagttctcctatttctagtcctcactatataatatttcatggcatatgtattctcaatatatgaattcaaaaatatatattcaaatattatgatcgacaatatctcatccaagttctacactaatcaaattttatatccattatcattacttattctcactgcaatctccacagatcaaaagtcttctcttttgtgccaaacattctcagatttattcttcgcactgaaccgattggttatttcggttaaccgttatttcgaatttgggataaaagaaaacaaaaataaccgattttgggaaaaaaacggcgagacgagagagagatataagtagttatgggcgttaggttattcattcggttttggtttctattaggttatcgattcttttggttctaatgtttaatccattcggttattttgaaatgttggttcggttccggttctttcggtttaaatatttagtatccattcgattattttgctttgtatatttttcgatatttcagttatttttaagtatttttattattttatatatattttcaagtattttaattatttagtataaaaataactaatattttaaaaatataattatatttccgatatttttgattacccgaaataattcaatttggtaccgattcggtttcggttctttcggttatagaatttactatccattcggttatttcaaattttcggttcggttcgattcggtttaattcttcggtttcggttccgtaagttcggtttggtttatttccccaggttttttttttttaacaatttctttcaattgatatgattaatagtgattacagtgtagggcgtttgtgataaaatttggtacaaagtaatgataaataaaggaagtgtcttgtggcagatgagattttgcaagcatatcagccggttggttgttcgttctcggcgtccaactgaaaataacttcttcaaaacgtttgctccatgaccaagcttcacgtatccaattaaaagctccaaaatgcatttgttttctgttcagtagttcttccacctgtttgctatcaccttcaaagatgactttacggtacccttgactccaagtatgctgcatggccatgaccaaagcttggagttcactttccaaagcattattcattgttcctccaactgcttgtgctgctcctttatagaatcctttgtcgtctctgattagccatcctgagtttgtttgttgtgtgcggtaattgaaagagccatcatagttgcatttaatccatcccattggtggttgttcccatttctgatgtgtcgattcccgattgttgcagccttctcttactgtgtaatgattcagactttggatatattcttgcgcattctcccattcttgtacgtcatcctttgctcgctttagtgtactttgccaagataaattctggtgctgaaaaacaagctggtttctactcctccaaagtctccacataatccaaagtgcaagttgagatagttgcggttgatttttagccaaaattcttgatagaatgatctccaactttgtctctaccgatgcaccaacgcttgttagaatatgatggggaatgcccgatgcgcgccaaacctgttgagcataaaaacaatcaaaaaataaatgctgtgacgtttcctcatcctgacagcatctgcgacatatagaatggttgttgatgtgtctgcgacgaagattatctcccgttgctaaagcctcagaacaaatcttccataagaaatgtttccccaggtttatagataaaagaatggtttacttcactgttgaaacgttcaaaacaaaatagcaaaaaaaaaagacataacgggcccattaaggcccaaaatatcatggctcctacattttcgcctaatccccaaaatttcaccaaaaaagataaaacaaaagctgaaaggaggaaaccagaggaaggagacgacgaccaccaccacaacgcatctcagctcttccttaatccatggcagtacgatctctctccctccctctctttttgtctccatcttgttcaatctatgaatcttgatatttcctgtttcttctgtttctagtttcacatcttttgattttgatgtttctgtggtttcttatttttggtggaattgttaaagtttgattcttttcttttggttgttcgcctggatttgcttcgagattgatcatttctctcgttttttctttgtggtcctttattcttttggatttattcgtatgtgaaatattttgacttggtttttgcttgtaggaaatggagcttccttgtcttgatcttacaaaagtttatatgttttgtatagattttcagttactgttggaaaaatcaatacttttagtttcaagattttggtgttgagaaagtgttggtttttaatctttcataatggctctgctcttgtaattggctaattctaaattagtgaatagacaaagagaaagtcttagtaacatcttgaacagtggatagggctaatgagaagaatggtgtagttgttgtctttgcatatcatcttctggatttcaatacttttgcatatatagcttcttgctttactgaaacttttgcatgtatatgttttgttacgagttattgtgttggacatagatacagtttaatcatagaagacaaccttgagtatcatcttttagaactcactcgggtgaattgaaatgtttggattgtgtctaggacaagggccgcccgttgccgaagtttggcgaatgggatgttaatgacccttcatcagctgaggggtttactgttatcttcaacaaagctagaaacgagaagaaaggaggtggaaaatctgactcaccagggaaagatgaacctggatataataaaaatggggaagttcttgagaaacccgccgtgagtcgcagcatctcttcttcttcttcttcctcttcttttaatcatattatggatgtcttatactgtttcttgcatgatttgcagaaaaaatggttttgctgtatacgcgcagaataagtggagaggtgtttgccttggaaggtcttttatctatatctaaaatcatactgcatcaagaagactggagcttgtctgataagccatgacagtcacttttggattttcgagtggtgtgtttagtgactccggttgttgtgcaaggttgaatgtatctagataacaacaatgtcgttctctatgtattggtgtgatgggttgtattcttcacttgtgagttaatgacaacttaaatattgctatctctctgttgattttggttccatggaaacttctgtaaatcgatttcgattcagtttattcgatggttttttgaaaatgtcttaaacatcagaaccaacaaacctttctagtctttcctcaatactcacagagcaagatacaaaacaaatgtactaggaaacgtatttggagatgtattatgatatggtctctaagtatgagaaatgttcctgccaaaaagtccagctattcctttctcagggtcgttctgcttcacaatggattctccaaccaaaacctgtaatattaaaataagctcacacatcagtatcacagcgaatcattcatctgattaatgtttgcagaggttttgatggttgtgaaagcttactgctttgactccggctgcttgtacataggcaatgtcatctggtgtaaacagaccagattcgccaaccaccttaacccacacaacaagattcatcatggtcaggactcaagattatattccagtaaatgacagacaccagttgaagaatggaaagtggaagtacttacaatcatgtctctctcacggatttgtctaccatgctctccttcaagaagcttctttgtattactgatgtccacttcaaatgtttctgtgacacaaaaatgtaagatttgtgagactcctcaactgaactaaactgtccacaacaaaactcacatccccatgaagtcattctagaaccagagatatgagaactagcgatatatacaaaagctatattaccaagacttcggttattgatgccaacaagctcgattccttctattccaagtacacgacccatctctctctcatcatgtacctaattgaaagtcaaatatattaagagtgaaacaaaaaaatactaaatttcaacttgcataatttgtcatctaattgaaagagacctcaacaagggcagccaagctaagcttcttgcaaatcttaagcaagaaggttatttctaggtcagccaatacagcagcaataagcagtactgcatctgcgcctttagtccgagcatagtagatctgccatggatctacaacaaactctttgcataatagtggacactgcaataatttgaaaaacatggattacacaaagtgttttgataataacgcaccaaaagcaccagaatttgttaagaaaataccttcacaccagcgctccttattgcttccaagttttcaaagcctccctgttgaacaacatcaagataagaactacaaatgttaaaaacttgttgaaaatgtgagtaagatatctgcaactgaatacacaagtgaacctggaaatacttctggtctgtcaaaacgctgaggcatgctgctccgcctttttcataagcttgagcaatctcgacctgtaagacgataagcattaacatcacagccagaggaatcatgaacaccttgcgggtttagataaaagaacaatagcaaatcatattggaaactgttcacaataaaaagaaaaatgttgatctatttcccaaggccaaagactacaatgctcaatgttccaatcttttatccattgaagaatcaacctttactcgcttaatcagagtccactaactcaattcgagaacacgatctaaagtcataaaggaaagaaacagaaaccagtataacataccgggtcaaaattctcttttaagattcctctacttggagaagccttcttaacctcagctatcaagccagggaagccagttcttttatgagccatcctaagagccccaacaaaatccctagtaggaggagcatcctctacagctttcttcagcacgtcaagcggatttagctccttcatctgaagaaccaaaagacaaccaccattaagaaaaactcacacaaagctctgaaaagaaaagtcttgtaaaaagaaagtctttacccgggaaacttctacgtctttgtaccatgtgatctcctccaagatattacgaggagaatcagcatcattgttatgcaatctcaactcaaatggtccagagtatcccaaaggagccttacttggtggttttctccttatcctaataccttgactaatagctaattcctcctgatacatctctacttcccattccttgattctaagaacatttcctttatcctctactgatgaagaagacacagctaagctttccttcaaatccgacttatccaaaacaaaaaggcaaacactttcagcaacagattgataacattataatcagaaacccccaattttgttccagatagggttttagactcaaggcaatcacaaagttcaatctaacaaccgtggacaacataaatcacacagaatcaaacgaaagactcgaactttaatggagggtgttcatagaatccaaaaaaggagaaaaatttggtcgcacctgttgagctcggatcgagaattgcgacggagccctaaagtttatcttcctgtccatggcaaaacctgaaattgaacgtctgattgagacagaattgttacaccgatacagagaaggtgaagccactttaattggaagtctctgtaccggaactagtccctccattgccggaaaaaaaaaagtttcgaacttttgaagaagaaagaaaattcaaatggtttttgtaatttatggtcaaacaaaagtttatatagaagttggattatgaatatttttggtagttggtgtgattaacacgtgggttaatagtaagacggcgatttttttttgcaatggttggtgaaaaatacagttgagcagagactggtctagtctttacctttgatttgtcacattttgattgtttttcgtttactacactactttggttaggaagtcttctatactttggttaggaagagttcaaattccttcaaaagttcattccttagttcattccttcaaaagttctcccttcaaaacttcttgtatagtaccttatgcacggttcatccacttaaatgcactccagttcctcgaagccaacctttttcttaaccttacttctaaactccatatataccaagttcctgacactcatctagggaacatgtaataattttgctcaatttcttttgttctataaatcttcaaagacattcgattacaaaagtattctaattttgctttctccaaacctaatttacgtagttaattcaaacttgaaaaaaacaaaaattaatggaacaattttacgagattgaaaaagctaagaaaacaattaataactaaatgtaattcggtgcatttagttatatttagctataattttataacaaataacatattttaaataacatatcttaaataatttgatatcaagaaaaatttagttatatttattaaaattatatataatttgttttttgcaaattttagacaaaatttagtaaggttaaactaatttttatttatgactatttttttttgttttttttttctttgaaaaccgaaggaaaatgatcaaaattcgtcacctttcctaaccaaaaacaaatagaataatcataaaatccgaaaattctccaacccgaattattctaattcaaataaatccaaatgtttatacctagatagtgatatgtcttttctgcacattctcatgtttcaaatcattagttaacatttagttcatatatataaataaccatacgttaagttgatgtataaaacatctttaaagttaagttatgaaatgacatatattgacaaaaaaaaataatgacatgtttcccgaaatcaaatggtcattttcaccatattatcactgtctaatgacgtcaggataatacttgaaaacgttgtagcaaagccgggagatggcgaagaagagagacagtccgaagctcatcaaaatcaaagacgccattaaactcatcaaccaagaagtcagtctcattggtatcgtccttgaacaaagagaaccaaaacaatgtcgcaacaatggtacttatcctaaaccccctaaatttgactcaaatacatataatttgttttgtgaaagctctaacattttacccaaaatctgaaagttggatttttttcttagattggatttgtactctccggataattgatgatacgtatccaagtcctggacttactgttaatgtatatagtaggactcttgaacaacttcctcaaatcaagaaccacgacgacatgattctgtttactcgcattaaggcacaaagagtcttcattttccttgtgtgttttgtggaggaggtaataaagtttggatttttattgtgtagatgcaaacttttgatagtggaaaaagagtaaacgctgcttgtagtagatgggtttcttcctttgccttgttcgaaggtgaggatttggtttgttaccaatgtagttccaataagctttcatttcctgttttggtacttagctatgcagagtatatcttacagaacaaaaccttgctccgtagataggaaaacgctttgatttggtgtgtagggtaatatgctctatactctctattaacatgagaaagcacttcattgttacttacaaatctttttttggctcaaactgtataccttttatgttttgttgactgatactaccttgttttctgctgtttcttgtgatggagattctccatgccgatgaagatacgagcgctgtttttgtttgggacgggactgatgcacccccagcatctattctggctaagtgagtattaactagcaaggaaaagagttttcaatcttcagattatctgttttgagctgagtcattcattcaggcttgactctacgctttccatatcctacgcttactcttcttctatttggtgtacaatgtttagcagtctctctgttcatactttactgtcaagagatgtactgctcagctttccaaccgttggaacgatcttgagagttcatctaagcagtcatctcttttatcgggttaaacctggtgattgggtgaaactttaccatttactctgtgaagttgatagaggatcttgggtaatcaacgttaccagctctacaaaggttcatcatatcgctcaggatgatcgtttagttgaaaagatcatgaggttagtacttcttgaggtttctttcagtaactacttcccacctttctgcttacgacaagaatctcttaccattttgttttataatcttatgtgccaaaaactaggatgtatgataagagactatcatcaaagttgggacacatttcattctggtgttttccgtcacctcctggattaacaggttgcaaaaactaggatatatgataagagactatcatcaatgtttgaactccaattttggttccacataactcaaaaaccattaatacgaaagagtctcacattgagtttaagacataatcaaaagaaacaataaacaaccacacaagtctttcttgtccctaactgtgaaaaaagagagccaatcgtccatcttagtatcttctgggtgccctgccgccgccgaaagcagggattggtgccatagcttgttgtgggtcgactgcagagatgccgagagtgtcagacattcctagagaagcaagcatctcaagagtctctttgtcgaccttgatctcatcagtcttgatagcagactcatcgggaacaaagtccatacggcgttcacgctcttcttcttgaagcttgagtgagattccacggactggtcccttctggatacgtttcatcaagtgggtggagaatccagcaatcttgttgcggagtctctttgatgggatgatggcaacctcttcaaggatcttcttgttagtgtgaaagtcaagagtcatgcgagagtagtacttctcaatgacttgacgagaagatttcttcacggtcttggttctaacacgccccatctttcagttacttacctgatgagaagagaaattccatgtcttattaaggattcaaaatcaagaaacaaccaagtatagatgatttatgtcttaaacttcaacattcaggttgaacactaaacaaacacaggaaccacatgtaaatgcaatgtcaaatattgtcaagagaattgaaaatgagtcaagtaatatacatcaacataacgctcaacttgaaagaggtctagtgttcttatcaaacaatataagccaaattttatacatacatttatattcagcctaaaagaatattaactcacgacacacttttggtgaatgaaacacaaaataagagaaattcagaaaacaacagaacctcttcacaagttggtataatatacaatgcctaatcttaagaccaaaaactcaactgcattagaatcttaattaatcagatacaaaagctacattatcaaatttgacacatgaacatcaaaatcaagcaacctataacaattcacacagatacaacaagaatagcaaactatcaagtcaaaagtcatgtaaacgtgttcactattatccactagtcttctcaaattgatttcatcttagttagtagatgaaacccaaattcaacattacagtaattgaaagagcgataagtagagcaaaaacagtgacttctagggacaatctaatcaacacaaacaagtgggagtgggcaatataaatctaatgttgtcaaacccattactcaaaatctacagacctaaagaacttacaatcgaaatctaatgttgtcagagatcggatttatcaatactcaccggagacaaagatggagacggagacgaagagaggcagagagcgatttcgatttggagatgcgagagaggcagagagcgacgattttggttttggagtttccaaaattttccccatatactgaaaccctagcctttaattgttgttggacccaaatggtttttgggccaaattaaatcctttcattttgggcttgtccatacttaattggacctggcaggcccatggttttaagaaccaaatgacaatcctaagtgttattatcaaacaatataagctattgatacatcaactaaaactaaaagtaagtatgaagatacaacatcaatattcaataataaatcaacccatttcacacttttattgaatttaaaaactaaagtcaaaagcaatagacgctctgtgatagctctctggtccaataatcgagaaacctatcttgaccaccttctccgacgccggtgtagcccacgcttgccagcgtcgggatttttccttccctgcttctctctatttcacattgctatctgtttcccctcttgtgcggccgtttcctcaatcatctagtgtaatcaagcgtcttaaagtggagaacggcatttcatcctccatcatactcagatctatcgacgctggttcttcctcgatctccctttaaaccttcttccaccgtatctcgccgccggtagttacttcttcacctccccttgcgattcaaccaaatccctcttgcctcgtcttcgagctctcgggattcttattgttggggagtttccggccaaggcttactccggtgaaggaagagaaggtgagcggcggcgcagacctaattgcttttgatgtctcccgatttgacctaatctgccaagtgggcttaggcccattctcattttcttcgaggctcatttgcaatataggtggtgcaaaacgttttatgcagaagcccaggtctggtccaaaccttttcttgctctcccttagtataattttgagccgattcatgttatcttttgattgtggacgtcaattagagcatactctctcatttttgctatgttggtgcaagatttacttgagaaccctgccactagaaacacctaggtccttcttccatggttgtaagagtttgaaaaagagcggcattatgatcccgcctccacggagcggtgattaccgtaatttcttcaagttgtcatctatgctgcatctatttattgaatccattcagtcactattgcttcttagcatcgccagagatctccctattgtttttacaagagtaaagaagatgggcattatgatcccgttattaacgagcggtgattacccaagtttctccaaactcttttctccgaacccactgtaattggaacccaagatcaaacccgaatttatctgtatctttcaggatattcaccttgttgtcccaacgccctctttgcgtttcgcatcgacgaaccatgaggcaaaggacttcttctcaacgtcattatcattgtttgatagtgactactttgtatttcctcgacatgctagtggaagtgtcattgacacactttgaagtcgtttgtggtatgtggcttctttgcctctgtctccgactctcattggcctatccttttaagttatctccctatgttgctagcttatgcttttctaagatttttgtaatctgtttcatctttgaagactttgtaaacttgcccttaggggatttgatggaatgaatacaaatcttgtttgacaaaaaaaaaaaaaaaaaaaaaaaatcaacccatttcactatttttccattgtcttattgagagattgacgaatctaaccaaacctatgatttattagctacagagacaaaaatcccaacaaaacatttgaaacctagagaataagcttctccagttttcgacaatgacacaattcctaggttaaccagaacatacctacgaaaaagaagaagcagcggcgtacaaaatcgaagaagctaagatagaagtgagatccccaactcaaaattgataatcgattaagttgcagaaataattggaaatttgattgaaggaatacgatgaaaggggtgagaatgagggaatagtaaaaagaaagcttaaaacaaaagggttttagttgtgtccattagattcattttaatcaacggttcatattagaaacaatgtgatccgtactttaatgggttaggcaatgaaatagatttatttttattttctgcttttattggttttgcttttatttattttcttataccattttaaacagattaaaaaatgttatatatagtaaaacttttataaattaatattcgataaattaataatttttataaattaataaatttttcgggtccggagttggacccagtgtaaaaattgttataaatcaataaattaatatgataataatttttcttaaaaatcttatataattatatgttcccatcaatagtataaattaataattgtataaatttactaatatatattataaatatcatatgtaaaatatgactatagtaattttgttcgtcaatttttattaattctttgtagtgttcaattctagtattttacaacatcaaaaaaattttgtactgctttctaaaactacttctctaatttaatcaattttttcattgtcttattgagagattgacctgtctgtatacttccatcataatgaccagactgattgttgaatgtagactgattattatccaaggtatgaaataccacattcgatattctcagattttcagattttaacaatcgatattctcagattttaaagtttatattaaaccctaactctataatgctcaaaatcaatacacatacacaatagagtaaccgtaaacaaagcacaaaatcatagataaaacaatagaagtagatcttagcgagcaaacaacaaaacaaactatcgaacaaaaaacgattaagaaaggagaaagaagaagaccttacccctatgaaattcgctgttaagatttggaaagtggaagaagatgtagaagatgatgaatttgtcaagaagaagaagaaagtgaagaagtttggtttcaaaagagttggaggcagagagaagtcgagagagtggaacccaacaattgggttaatgaaacattaaccttctatacggtttctaatactcagtttaggttaaccagattggactccgataagcgaactgacccgaaccgaataccgatagctccaattaatttttccgaacggtttactcctttgctacttcaattcgccgataatcgaatgattcggtttttctggtttggtttactcagtttaaccaaaaatccaggccgttgagcagagactggtctagtctttacctttgatttgtcacattttgattgtttttcttttactaaactatttaggttgggaagtcttctatactttggttaggaagagttcaaattatcggatcattgtgtagattggttgaaccaagatggtttagtgattaatcaaaacacatacaatgtagggtgaggttggaaaattccatatacatagctccataaagagtaggttatggccttgatctgagtgacatgaaacatgggctttagagatgggcaaaatattcgttaggattcgcttcaatccgttattcgactctatttgttttgaaaaaaccggatatttgtaaatttaggaaacaaatcaaatataaaaataggtatttatcaaagtaacaaatactataactttaataggtgtatatccattacgctctggaatatatatatatatatataaataattgcatatataaattctaattttattgttcttatatgtgttttataatattatattcacctaattaatcatttgaactactagttttaacaattaaaggacaaatctatatttcttataaaaatttattatttttgataaaattttactacttttgggattaaattttaatttttttgtattttttacttttaaaaaaataatatttaactaatcggatatctaacaaagagtttagattttaacggatattcgtacagccagatattcagtctccaacaaagcaaatacaaatcggaaaactaagtaatctgataaagcaaacggatcacaaataccaccaaaatctcagaaatccgctccgtgtccggccctaatgggcttagggcccctttttgttttaaaaaataaaataaaaaataacaaaaaataggcctccaactttcttaatgtttaaaattttgtcttgattgtttgaaatttgtctagaaaaccctaaataaaaatttgctaagatcccaaatttctcagggtcggcacttgaacttgtggattggaaactgagagagatagctcttgtacgtgattttttattttgctagagatagctcttgtacgtgagagataaattccaagaacctggagtttttaaaatgatgagagttttgtagaatgactcatatttttaagatagttatcatatttgtttccttactttttaatgtttttttttcaaatttagagttgaaactaaaagactcattttcctacctttttagttttacttaatcatttcaagtttaaaaacaaaaattacataatgctaaaatagttttaaaatattattttaaaaaaaataattactacatctatataattttaccaaattacttatctacttgttatgtatagtatcttaattttaccgaataatttctcgatttagtgaaatacaaagcttatttactttaactctatttgtgaatttggaataaataaattttacatatcttaggtcgtgtattgctaatatatttttcttttgtagatgtattgacttgtgttcaagatttaccgtaaaatcatttcacgtcaaagattcttacgagactaacaacttgtaaatacattcaaaatagtaaagtaacaccgcaatggacagacttatggaagcaactcccaagcttgaatcttacaaaatccgagttcaaaatgttatcttccaaggtgcaaagtgtagaggagattgaggagagtaaagtggttgtggtgtcgcaaagtatgaaaactattgaaatttttctcaaagttccatgtttgtagctgataacaatgaaagttgacgacaaacttaattgatgcaccaattctcagctttttaaaggtcaagagtgcaagatctggttcttttacgatacgacaaaactttaacaaatttcaagacacactttcaattaagtttcaacaaaaaatcttcttagtgcattaagtcgatattgtaaagagctcattattcatcgtagttattttgaagaagtaaacattcaaatttttgtttctcccttgcttgaatcttaatcatatcgcatatgttgacaatttttcatttcgttatatagaatggtggactataataagggaaaagaagaggccccttgtttcaaaatctaactagactcaagctcttaaagttaagagctcaccagtcactggttcttcagatattacttgctacattatatcaatttcttatgctcaaaaatgttcacttctgattgctgagtagatgaaatattttagtttgagatcttttaaataatttttagatcaatttaaataacttacaaatttgaaagaactatggaagaactattcataattatgctaaaacaataatcaaaatatgatttataatatcaacatttcaataatggtctgacttatcctattattaatatgctacaggatatgttatgttgccatgtaatatgttttcaagttttaaaaaaaatcatggaaaataacttaatctaccaaccaaaatattattcatattactatctttaagataattatttttttactaatctataagctgggcataatgtccgaatccgagcatccgatccgaatccgaaaccaaaatctcaaaatatccgaatcggtttctatactttcaaacccgaaaaatcggtatccgatccgaaccgaaccaataaatgcgttcaattccaaccaaggtcaactagattggaggaagagaagaagaaaaaatgttgggaagcataagcctcatctcctgcaacttctctcgccttccacgtcttcttaaaccctccactcgacctcaaaccctaacacaatcctcaagcctccttcttcttcttcaatcacgagcttcttcttcaccacatagaattgcccttttcccgaaatacgagaagaaagtcacattcttccatatctgcaaaagctcttcaaacaacccagaagaaccagagaagactcaaattcaagatgaaggaagagactggtctagctcaattttgctttttgcgctttggggtgcgctcttgtactattgcttcaatctcgctcctgatcaaacacccgtacgcaatcttcaaatacttcataaagttacgattttgcaatcataatataatcttaggtttttgtattgcagacacaagacttgtactttttgaaaaagcttttgaatttgaaaggtgatgatggttttagaatgaatcagatccttgttgggttatggtacatcatgggtttgtggcctttggtttatgccatgctcttgcttcccactggtacaaggtaccatccatagtttgttcaagtgaagctcttttaggaacttcaaacactaactaatagagctctttgttggacagtaaaacaccggcttggcctttcgttgtgctttcctttttcggtggtgtttatgctttgttaccttattttgcactgtggaatcctccttctcctcctgtttcagagactgagctgagacaatggcctttgaatgttctggaatcaaaagtaactgctggggtaagagattatctctctcactctcactcttttgaaatcttgatttgttatcactggacttacaagttaaagaaaattgtctcttgccttttggtctttggttgttgttggattatgaatcaggtcactctagttgcaggactgggtataattctttattcagttgtcggtaatgccggtgattggacggagttttatcagtactttcgagagagcaaatttgtaagcctcatttccctggaaatgttttcgtatctgtcctcatatttgacctaaactaaaatgcagattcatgttacaagtcttgatttctgtttactctctgcatttgctccgttttgggtttacaacgacatgaccacccgaaaatggtgagttctatgtacaactagtttgcggtgtttactcactcaaacctttttctgtttctctaaacgcactgcttctttatcaggtttgataaaggcagttggctgttaccggtatcggtgattccattcttgggaccttctttgtatctactcctacgaccagcagtgtcagagacgatagctcccaaagatactgcatcatctgacccaaatcaatagcaacatcaactttctcttttgctcgatgacaagactattgtccagaagccccaggaagatttcacaggaccgaccatcatatttctgatgcatgaatgctgatgataacattatgaacatgataaaccaccaacgtcacaaacgtattctagaatacaaaacctaattccggatcataaggaggatttcatttgtaccttttgttttcagaggatttcatatggttaataaagcagagaagttttacctaaaggagtttttcgatccgcgtctacttttcgaatacttcagctccttgtataccacaatgatttactctcttctataggctatagctgatggaagtggaatcatataggtattgaattaacaaaaggagaaaaacttcaagtttattgtagatataacaaaatgtggaaagtcagactgaaatatatggagtttgtcacaagtccaagaaaagtttttaggcatataacttgctgagttcatctttgaacttggactttatttgttctctctttatcttaagagcagcagtgaccaatcccgactccggtgtccacggctctgacagcaacttgatctttgctggaagctcaaacttttcgagctttgccgccttcccggcctgaaatgataataatattttgtaatacatatacttaccaaacgtaattgtgaaaaacctgagacagctattgaaaatacaaaccttggtaagagattgttgaacctccttgactgcttcacctttctcgcatagctcagcgaattcgctgtgtttaactccagcttcctctgcccatttctctaatgctcctcgtgatggaacaacaagagctacacagtagctgttaattgggtctgcgtggaccatgatgttatcaacgtaattgctcgaacccaaagctgcctccacctgtgaattgtgtgatccaggcaatgaaagagcatgatgagattttatcatataccaccatcctctatgtagaatttaagttctataggcaaacctttccaagggatacgtattccccatgttgaagtttaacaatatctttctttctatcgatgacttcgagacatccatcagggtggaatctcccaatatctccggtgtaaaaccaccttgtgcccttctcatcgacctgaaatcgtcacatggattctcagaaatctatatagcaagcggatcaactaagctccctgaatgtgctttaccttgtaaacctcatcggttttttcttgattgttgaagtaacctgctgttacactgttaccacctaccacaatctcccctctaggcattggtttatctgaaattctgtagccaccttcttcccaagaaacgagctgcaagatgaaatttgttactcatgattacaataaacttgcacattgtcaacatggtgtgttaaagattgtctgcaaaccttaacgtagccgcatggaagtggaggtccaacacgaccaacagcaggatcgtcccactcagaaaacgtagctccagcacacgtttcagtcaatccatatccttggccgatgggagacctaacagaaaataatgcacaatcataatcagaacaaactaatcccaagcattgtgaatttgcaaagaagaatacagataaacacaaaccaggcaccaaaatggtgtttgtctaagccaaaatgggacaagactcatatgaaaatatcagatgtgagactacattaccccatgcagatattgatgaagcgttgcgaatcaggagacagaggagctcctccaacgagcataaaacggatgtgtcctccaagcacagcgcgtattttcttgaagacaagagcatcccataacattttctccaaaccccaggcaccaaaccaacttccatccacagctgctaaccggcgcttgtatgcaaagtcaaaaagggtcttcgccatccctcccttttcctcaacctagattattacatacacaaattgaagtatctagtaagtaactccaacaatacacacaacattgtcgtctctaagatggtacctttttaagaactccttctcggacacgatccagaatagctggaactgcagtcattatagttggcttcagagctgaaacatctcctttggttcctttcttaactttatttgaagtgtcagttaaagtcattgctgagccgtaaccgatggcactacctgaggtaaagaccacaatctgaaaaaccatgatttggcaagaaacagtaagaaaataagttagcagttaaaatgagagagacatagagagggagagagagtacagcaacatacctcagcttccagctcaaacacatgagccaaaggtaagtacgcaatatatgtatcatttttatccaactttggaaccaccttcataactcctgcagcagttgcgacaagatttccgtgggtaatcataactccctgagtgaatgcacacaatgtaaggtacaccaatcaagaattcaggtgaacaaaacacataaagaaaagagaagacacagtgcaacacatacctttggtagaccagtactaccactggtaaacattataacagcaactccattcttcgaaggtaagatcggttgaacagcgttcttctgcccaagtttctcaacttcagagatcgacgaaacagttatatcacccatactattgacatcactagaagcaacatctactccatcttcttcaatgtaaataatgttcttcacagttttcaagcttgattgtatcgcagacaacttcttaagttgttttgagtcacatattaaggttgacactcgagtctgtcaacaatacacaagcaagattcagagatccaacaaccaaatttactaataaaaaacatacacattcaaaacttcccctaccaacctcattgagtgagtaaatcaaagcctcttctcctaaagaagcataaatagtaacaacggttatgctctgcctgaaacatccctggaaatttacaacaccaaccatttcatcagacaaattcaagccaaaccaacaaaacaatagttgataaacaaacctgaaacgcgataaaccactcagcacgagtatccgaaaagatagcaacacgatcatcaacattatgtcctacattaactaaccccgacgcaaagttacaaacacgttcaaaaacctctccataactttgccatttatactctcctaaatgaagcttctcaaacttcctcccatcactagcagtaataaattccttatctataaactctctagttcctagtaaccgatctttcgaatacttcttacaagactgctcaaacaaagcaggcatagtagcagctccttcccaaggtacatcaaccaattcaggagctcgagcatgacgcattgtgtaaccttcctcgccacctactttgatgggaacacctctctttttcccctttttggttccattcaacaccacagagagtaacacaggcacaagtaaagccacgattccacctcctatgattccatagactccaaagtcactgcctttagatggtgaatccattggattcactccagaatcttccataagcgcgaaagctacacaaaggaaaggaacaataacactaatcacagtgatccgatgatcgatcaagcaaattcaaaatcggtagatcacaacagaatccaaagaagctaaggcatcgagaaaaaagaaacgttttttggaattgggttacctacgaatagattgagaaatcagtgaaaggaaacttcttgatgatttcttcgaatcgggttccagagaaaaacgtaaagtttaaaccttttcgatgctttgaagttgtgaacaatccgaagcttgtggactctgtcctttttcgggaagcctttggttaaggaatgtttcgtcggtacggtaatggacacgtgggagatggctaatggagggacacgtggatgcttctccgtttggctttttcttgccacgtttacctgaaattccggagacgctacttcgttgaagttctaaagattctccaattgaatattgtgaaaagtaaaaacgctgatttttcaattcagaagccaccagaaacgtcttttttcaaaacgctatatttcactcagtttaaaaaagcggttccaattttgcgattttaaatattaaaacgttacacccataaccgagtccgagttatcaatcaaaccctttataagcattttgatgaaatgtgtgagtcaaacacatatgaatacacaaagcagttccaaaacaaagtaagaatattcatatctccatttcaaagatttctccgttacaagacagcttctgttccttctctcaactgtcctaaatgatgcctatgttcgcttaggagatgaccgagagtgttcttgagtaccaaattctcaagatatatatatgtctattaactaggaagctccaattgaattgaggaaagaaaatctaactggaaccacggcgaacactttcttcggttcgttcaagagcatttgttagcacgtctattgtccagtttttcaagtcatcctgattaaaaaggaaacaagcaaaaggtttggtcatcgagtgacgatatgatttggtaagatactgcaaggattggtgatttaatagagcggtttaccttgcgcacaggttctccagttcttatttgtgcatttgggcgagcaagctttgactcaaaaggtgttcttggccttacttctctaaactcatcccactcctcacgatcgatcattcgtaccgtgccttgcccctgtggtgcattctttatcttgcgttcaatcatttcttgcgatttcgaatcatcgatctaacaacaaaccaatactgagaatcagcaatttccacagatccttcctaattcaattgcacaaaaaagtataaagcaatctaacagctcaattacgaaacaacttctacttaacagctgctaaagtcactgacaagaaagacgcattcaaagagatgacagaggaaggcttaccatcattagcacctttgcaaataatgcgatacctacaacagcgaggaacataggcatcgttgctgtgtctaaatatgatcttgattctggaacctcaactagaaactggttctttattgggttccttcgcttcttactcttttgcaaatcggctatcttctttcttaaggtctccgttggggcatcattagacggtgaatgaaaccttctcctaagcaatgtaaataactgactctgtcgagacatcataaccagaaacagggatcttctttctatgccaaagataaagaaaaacacagtttagccaaactggaaccataagccctactccaacacaagcatcaagcagaaattaacttttaatggacagttttgcatataaagttcaatcacagaaagtaaaatgcgacagatttaagctcatgtggaaaagtctctctttttcttttaccagaagccctattacaagaacacacctatcctggacatggtggagactatacctctctctctcataatgtcctcaacaaaaacacttcagagatcatcacagaagcttcaccacatagaccgcaagtcctaagttccttgataatcctaataagaagctgaccatactaaaactaaatcgatatgcaaaccaaattgcaacttacttactgtgctatacttagaatctgctaatgcgctatgcaacaagaatttattgacatgcccaaattttcaagaaataattctataggcatactatatgtaaaaataataatctgatctggaatgtcaagtaactttcgttgcggcatttttacgaacactttgtatgcagcttttactcaacatgagacatatgaaagattcgacatttttgcaacaagggacaaagagatatcgagatgggtactgaaaaaacttggctttgaactagaaagatcattctttaagcaaatcaatgaccaaatcagaataattttgttcgatgattgaaactctaagggaagagatgaaaatgggttaaagagatgaggagattgcagatgtaaacgtaccagatcaagaggggactgagtagacaaaagagactgttttgatctccacggtcttccaaaatcgaaaaatcgtctggcagtcctttttgcaaagaggaagccaaaaaatcattgtaaaaaacagaaataatttatttattttttcttaattcgaaatagatggatattactagtatatccttatccgaacctattaattaccagaaaaatcatggttcgtttccgaaccaaaccacccgaaccacttttactctttatttgaaaatcaaataaaaaaaaccttaatatttccagggattttccaattcgaaattgtttcttgttctcattacaaccgttttcgattttttgacttcttctccttagtaaccgctgaaattaaccacaacattccctatttctttaaattcaatcgagcgttcttcttgctttcaccagtatttccgttctatttccgattcgaaatcagtcatgccgcctaagacgcgtggaggaggtcaagggaaaagaaaggagatagaagcgccggcgccgacgaagacagagaaagttaaggcgccggcggagaaagtgaaggagaaggtgccggcgaagaaagcgaaggttcaggcgccggcgaagaaagagaaggttcaggcgccggcgaagaaagcgaaggttcaggcgccggcgaagacgactgcgacggcacaaacgattgcgacggcgatggcaaccaatgcggctccaacgacagcggctctaacgacaacggctccaacgacggctccaacgacggagagcccgatgcttgatgattctacgttttatgatgctctgaagcatattccggctgaagaaactcaagagaatatgcaaactgatgaggtggaagatgaaaatgaaaaagaagaaggaagtgaagaagaataatcagggagtagtagccaaaccttgggctccgattccgattcagaggagacggagacaaacaaagaactcgcgtgtgctaatcccgtggaagaggcggagagacaagatgacggcctagccgttatcgaggaggaggaggagaggagctccgcgagcgacgaggacgtcaatgtggaaaagtccgtggaggatgagggagacgaggacgagagagacgaggacgtgatagtggaaaaacccgtggaggagaggaccatagacgaggacatcgcaaatgtggtaagtattccatttcgtaataccgatctaattgggtaataatgcaattgtgaactgtggacagtactagtaacattgggaaatgctatgttgatatttaggtaatattggcggatgtgggtaataccttagagtaatactacaattgtgatttatcagtagttagtactagtaactttgagaaatactatatagtaaaataggagtatctgtgttatactggtaattacggggaatacttgtaggaaatacagagtaataatgtggcagtactatttacaattgagtgaaatatgaacagtaggatttgtgtaatactggtaattacggggaatactttttggaaatacagagtaataatgtggcagtactatttacaattgagtgatatatgaatagtacgatttgtgtaatactggtaatttcggggaatactttttggaaatacagagtaataatgtggcatactatttacaattgagtgatatatgaatgaatgtttgtttctttcaggatatggaggaagcgatggcaatgcagccacttggtatgtacttcccggcgtcggagtataccaagaagatgaagttagcaacgaggtgttatatctcggaggtgttgaagaccttcgctgacttggaacatcctctaacgaatgttgaaaataattattttatggagcatccgagtttcaagcacatctatcacctaccttccggatatacccacaagttaatgaggatgtggatgctttttcttcgaacgacatctattgagaagaagaaggaggtttggttcgttgttaatggagttcccatccgctatggtattagggagcatgctttgatctctggtttcaactgcaaggcctatccagctaattattagagtgctggtaatatgaacttcgccaacaggtacttcaaaaccggggtaattagacgtgaagacgtaaaaaccaagctaatggagatggaaccggctagatcaaaggataggttgcggatggcggtcctctattttctaacaagcagcattgtcgtgcctactaagactggagaaagggctagtccaattgatgatttctgtgttagggctgcaagtgatcttacgttttgtaagacatttccatgggggagatattcatttgagtacatgttaaaatcgatctcacacacattggatcattttaacggtgtcgtcccaaacattcagtcaccatggcctgttcccggattctgtgtgccgcttgaggtaagtcttttgttttatccttgttacattttcgtaattgaagctaacaattaaatttcatgtgttttgtgtagtttttagcatttgaggccattccatcacttagggaaagattcatagaagaaaaagagggtgcacatgccggttgtccaaggatgtgcaaggtgaatttcaagaggaccgagatgaaaaggtttacccttcagcaaatcaaccatgtactcggaacaactgaggttaggatttcctattattccttgagcaaatatgagcaaatatgattttatttctttctaatatttcattgtctattattttcataggtcattgagagtataattagagagaaggctgaagaagtaccccttttggctgaaatcacgggagtagaggatgatgttgataagcacgatgttgtagttgatagttggatgaagcgtcttggtcaaaggcgtgaaattagatttgaggaggtgtacaacgaggatgtgcatgcacgaatgaaagccccaaatgaagaggaagttcccacagttgttggaccgggagacccgacgttagttgatgtaatggagaagctccattccatcaatgacaagctgaatgaagcttttttggcgcttatagaaatgaaggaaaaacaagcaacgttcgaagcatttatggatgagatgaaagccaagataaatctgggtaataccggatatactgttctataattggtaatatcgcgtaataccaagttttaactaaattaacaatgcagatgtctcagaacccaccagatgaggaggaatcaacaatcaaggaaaatgcggctgctcctgttgtgccctaacgagtgacccgttcaacccgtgcaagatctagtaacgtgtgaaaactattcgtgtaacttctccggatttgtattttgatttcttgtactttgactttgttttaggatttcgcaagtactcgtaaaactatgtttggattcaattaatctattaggatgttttatgatattgttaactgaaatacgggaaatacctcgtactattactactaggagatatactggaaatatcaaactgaacaaccatagtattaccaatcaaagagaagtcttacaatcgaagagaaagtcttacaaagcatactgaaagtcttacaaagcatagggaaagtcttacaagcaaattaacaataagattaaggaacaataggataacacattacttctttggatccataggattacagaataccactttgctcagttcacaatctctgcacggtgggctttcaattctttttgcatttcttctatgagatactcatgacttagaactttcttccgattgtaatcaacactctcccttaagctactcacctcttcttccatagccttatcccaaagtttacggatgtgcatacaatcagttctatcatcctacaaagtaccaaatatttatcaaatatagatctagatctacaaaaactagaaaaacttgtgcagtattacttgttctaggcagtattaccaaaacgggaaatactctgaaataccaaatatatctagatctagatctacacaaacttgaaaaacttgtgctctacatcaacataccttaaacttctcgcattgatagtatctcttttcatcctttcgagtctcgacaatgctaccaccacatggacaaaacttaggaatcccttccatcatcgcaaccatttccatttgctcaatggctctcttcgccactttcatatcatcgtagtaggggtctctctcacacagtctatccatggtagaaagatgaaagaaagatgagagatgtgagaaaattcgagtcgaagagagagatgagagatgtgggagaagagagatgagagatgaaagaaagttgtaagaagagatcgaaaaagaaagaggaaaaagaaaaaagtgaaatttttggttttggagggaatctcaaaatttgttaggcgccaaagattttggggaaaaaccaaaaaaaataattccccacgtgtgtgccgttttttggagatttttgacatgtgcgcagcctttttacagcatagtatttcctaaggttttggtagtgccaatttctcaaatagtattactttccatgtttttcatgtttagcagtatttcctatatttacaatttgtttatttagtagtacactggatggaactttataaatatagaggtttaaatattttgtgcaattataaattaaatatgtgtagcaatatgaatttttcattttaagttggtgataatattaaaagtgagcttaaaagtataagtgatatgttgtattgaatctattaaagataagttaaaaaatttaatattaaaatttctaacttaattaagtataaatgattaataatacatttttatctgttaataactcactgtattcattttcattgagttttgaggtaaacaaattcgaactccataacaccaacgtagtattaacagtagtactaatatgaccacaaattcgatagaaacagacatgatattacttgttataaccagtattacaaaaaaacaatagaaacagacatagtattacagaaggggaaatacagtattacatagtaagtccataccataaaaacaacaaatcactgtagaaacaaagtaaaaaactcagataggcgtattcccaaataataaccattgacacgattgccttggacgccttttgttttgcgtcctttgtcgttttggccgcttttccccggttgatggaaaccttagcatttttttccttcctttcttcggttttttagacagcggaactatcttcaacgcctttacttcatctggtacttcccactgcgacctatccggaacaagataaatagtcctataataggctaatgcccacaactccgcccaataatattttgtaaccaaatcatgtaactccaaacctcttctccgatcttcatcatccataatgttaatgaaagcggctaatgcatgaatacaaggatatttttggatatcgaaaaccttgcaactacaagttttcaaaagcaagctcaccgtataatctattcctttgtcgcatgtgactacatattcacgctcgaatgagtttagctccaccactttcagcttctcggcaaaaacccacaaatcatgcaaataattctcgaccaaaggcaccatcttattttctaaggatccagacgcggcttccatccgatgttcattaaaccacccggaaatgtttttgatgatcgcatcaagcattggtattaacgagtatttccttgcgtttttaaacacattgttcaaagattccacacaattgcttgtgtctaagttgtatctttctccgggaaaacaacaccttgtccatttttctttcacggttgtatcctctaaatacttggtcgccttaggatatctcaacttaaacccgtcatacgctcggttgaagtccgccacgacgtagacccgacttaacttctgaaacttccatgcgagtacgtctcggttggtgtgagtagcatgacctttcacattttgggacaaatgccaaatacaatacccgtgatgagcggcggtatacacgttctgtatggcctttatgaggcttgcatttctccgtcatgaaaaccaattctgaagtatcgggtacaaccgtttttagcttctcgaaaaaccactcccaactagcatcattctcaccgtcgagtacggcaaacgctatgatgtaatggtgacggttaggatcttgagccgacgcaaacactagcactccgccatatccgttcttcaaatgtgttacatccacaattaaaactttcctcatcactctaaaaccttcaatgctagctcccaaagctacgaatacgtactgaaatttatcattcttatccaatttcagataagtaattgtaccatcatttaccttcttcaacatgtatagataacaattgatatccttgtagctttcttccgggctaccttttaaatcataaatcgcatgatatttcccccttagcgctgtcgagtatgatactttcatacctaatttcgtctgaactagctccatgataattcttggaaccggagtttccaactgtcccggaaaatgatcatgaaggagagctgcgactaattgtgggttgccttttcttttcctgagcctactactacttttacttagccgagtgcaactatgcatcttattgtaccttctaatcgagaatatatcagtattactgatattggacgctcgtaaacgccaagaacagctctctttggcacactttaggacatagcgctccttatccgacttcttaatcacataaccaaaactgttagcaaatgcagctctatccaccacctcgtgcaatgccgccttgtttggaaattcttgacgtaaggtcaacccaattccgtcttcccattctttttaaacatacccggttctacagcaggtggcgactcaacatactgttcccccctatcagaattatccatagactcatcatagcgtgttttatcttcttgagtcccgtgatcctccactattgcctcaagttgatgttgagtcctgtgatcctccactattgcctcaagttgatgttgagttctttgttcctcttctaataagacgatgagtgcaccatcatccactctcatttcatcctcctctgaattcaactccgtatagttcttaccaacagaacttttaccaactctagacaattgctcgagcaattgctccggctcgggcggtttagagatctcctccacaaccaaaacacttttccgattattttttgcggatgttacataaacaaagacatcctcatcatcacaaacgttcatttcttcctctactccgaacaaccgtggattgtacctcatatgcaattttaccttatttgcatctaatccaagcttcgtcattatcctatcttctaacattgagaaagtaatcttctcccctaatgtcttcatcatcacattatacatgcgaccttggaatttaaaatatatgatcacgttctctttcattgtaacctgccaaaacaatacacatactcagtcaatattactagtattaccgattctagtacattttcagtaatactagtactaattctgaaatattacatgtgtgagtaatactattacatatatgaaatactacgtgtctaagtaatactggtgctattaaaacatattatctatataaataacggtactactatagctagttcgaccagtattattttcgcgacaagaacaaatattcgatttgagttcaatttagtatgaatcagcatgtgaaatcaattgcttacccattaacagaccaaatgaagcctaaatctatacttaaacttctaatgtaggtgctaaaacacaataacccaaatctaattggattgaatctcaaaatcttcaaaatatgtaattcaaagcttttgaagctctctccatacctggacttagtagattgatgcagcttgcaggaggagaaaaacgacaatgcggctcgccggagctcgccggaggaagaagcccgaagaagaaaacgagctcgcgctcgaggttcgtttttttttttgttttcagtttttgttttttttttcaaaatgttttcagaatattaattattcattcaaaataaaatataggggtaaattcgtcttaacacaattcattaactcaaagttgatatgaagactctaaagtggttttgcagattatttgttccacaaaggggacacaagagatgatcactctccaaaatcgctaatcttcagaaataaaaaacaattagtttccttctgaaataacttcggttatactttggttaaccgaaccgaaccgaaaattgtgaagaaccgaaattactcatgagagatgagttaggttttgtgaaatggtctggaaccaaaccaagtcacactctctcagtctcacctagtctagaaagaaaccgaagtagcaacactcacgtgggcgaagtttttgtgtggacaaacaacaatattggatatgcagacgtttgcttcggaagtgtttgtttcatgcttgcccatttttgccttcaaaagatgacaattaacacaaccaaaaataaacaatatgacaatggaagtagttgaacaaagatgccgatacatacgcccccattttattttgtcatttttagataaccatcttctttttgttatctataacacaattatcaattagttaggacttatgagtcataattagtactttttcatcaaaatttagtcttatctttcccaaaaaaatctaaatttagtcttaattattaagggcatcttcaaccctactatattttagagtaaaaattctaaattattctccaaccctactctatattaaactttaaaatagagatttatctataattgctctctatatatagagtaactctattctttattctattttagagttgaatttttttatttatactttgatccacaaatttaaactttttatttaatacttattatcatttcacgaacaacaattacaacatatagttttataaaaattaacaagcaaagaaatactaaaattaaaataaacaacataagaaaactaaaacataaaactagtaatttaatattctggtaaattggttgtagatccgccaagataattaaaatattgtccaaatgaagtagatggaggaagagtttcttgatcttgatattgttgttggacacatcatttttgtaaaatctgtgcttgttcagtctcaaaatatgttcgaacatttgggttttgaaagaaattcaaatcataaaatattttttttttcttcttttatttgatcatatgtgggaaaaatactctaatggtgttgtttaaaataaaatttgtaatgttttattattgtcatatgatgtaatgttttttatatataattagtgtttaatttaaataatatcatattgtatgagaattttgcaaaactataatatatatgatcaaattgtaaattatataattaaaaagtactagtatataaaatataaatataatattgttaagaatattcttttttatagtagaaaatagaaaaatacattagaattaccctattttatagtaagatatagagctacaaattggagatggtctaacccaacaaaattagtgttactttagtagttctttatttatttcacatggctaattattttcttatagttcattaaagagtactttattttgttaaactttaattaaagagtactttatttttgtaattaatatatatgaactggaaaataattagccataaagatcatatgatccaatctatgccattaaaatgctctgacaggttccgacttgtttctcttgtcaacgcccaaattcgactttttttttgtttcccttaacaaaccaaatttcactgtttcattcttttacgcgtcgagagtctcctccatgagaagcaaattctcagcttcttccgatgatctagcttcacttagatctcatgtaagtttgtttatctcccgatctgattttctgtctctctaacgttgttgttgattgatcatgagattttgcatttacccaattcgtttcaggaactgatttggcgagtttgatgataaagtttgtatttttctttgtgggttgatttcaaattgtgagaaagattcaagattttttgtcgtctcaatgatgcagcagcaagatcgaattggtgatgaaacagatcttgagtctttcacaagtagtgttcctagtagagacgcttctcataggtttagttctcatcagttctcaggaatggttagacaaagagcttatatatttgatggtgatggtaaatactataacaaagaatgggatcttgctgaaggaacagggaaagagttttgttggtatcatgttgaattacctaaaggaaatcagaagctttctcaatctgctcagcatttgattgatgctttatgcccaccattgaagcttcaggacattcttgctcttgctagtaatggacccttttgtgggcatgttgatggagcgcttgtctttagagttaattctcctggtcctgcttctagtagtaatacgtttaagattgctgcgaggattactgagaactctgtgatcactgtttctttaggacgagttcctaggttaggtttctcgcctatgggtcaatcgcttctctcggaagttcctagtgtgattgaggagcatgttcttgagttcttgttgaaaatgaaccattctgaggaagctgataaccctgtgccaacttctgtttcgaatcttgttgtgcatattattgacacacatgttgatcgacttcaagatgttgttactgaacttgagatcgaattggatggggtggagctagaaatggatagaggttagctagcactctcttcttcaaaagctctatatttgtcactaaaaccttaaatgactcggatttaaacatgcatttgccattgttttgtgcaccatttgattatttcttttcaagtctatgaacatttgcagctttatttcagaaggttttgtatagttgtttttttggctttatatgtatcatcattattgacaataggtggatttgctatgaagaaaaagatgttggatgatagaaggttcccgaaattgcatctcaacttgcagcgtctattgcaggtagagctatcactactaagccttaagctt

SEQ ID NO: 167 - DNA, 19338 bp, Arabidopsis thaliana
tctgaatcagttacgaggaatggggagttgatgaactgatcgtcgaagactcgtggaaacgtcaagtcggtggtgattgataaaatctggcctatgtgttttgcaaagctttctgctcttgtatggattatgaacttacgatatagtcgcatgtagaacttcttcatttgtcctattctccaacactacaagagtcagggactccaacaaaaatgcatgaacaacaaattttttgtcccaagttgtttttggacatgggtttcgacaagcctgcatgtacatatacaaagaaagaaaatccttcgtgaaaccaaaagaagaaaacatctataatagtttgagtattgagtaagtacaactcaattgataaaccttttctctcacacttcccagcttttgtcgtctcacagagtcagatcgattgatgcataaatgagtgatgctaaaaatcaaaaagcaagattagagaagaattatgcatgttgtttaaagaagttgagaaatagtaatgttaaaaactatgtgaagcgcttgctcgaggattgtttcagcaacactatacaagtgactggactcaactactcaccatagtctcggcccaacgcaaggatagtgtagcatgtttcttgatgaaatacatctttcaaaccaccgtttacaccatctggcatgagaggaatcgaagacgtcatgatgaatctccaaaatctgcagccactctaatacaatggatcgacaagcaaatgcgtttccaacgctggcttcaaagttgaagttaatcactaaattgttcattctaatttctgatttcaatctatttcatatagaacatatgatacactaattgtaacgacgttatcttttttgaatctaatttaccattttccaaaaaaaaaaaaaaaaaaatgcagggattagagaagaataatgcattaaactcaaagcaaataactgttaaatagaccttgggatacacaacgtacaaaataatgcatctacatatacatttttgcagccattttaacaaataaattctggactttgaacttatttacgactcaatgccactgaatttatgctaacagttaaatcaaatatttacctaacaaaaatattacctaaaatctctcatatattaactccaccattacttcaaacgaaatcattcctaaaatctctcataagtatttattaattttcggttttaatatcctgtaaaaaaaatcgatttcaataaaatgaattaatcatcctgatttttcgttttaaatcatttatttttgttataaccagagaacgagatagaagaaatgagtgtgttattccattgagataaagggttctttatataggtgtacaaggaaagggtaaaaccctagaaacatctagatgatgggtttagatgatgggccttataatgggcatccatctttattcataacactccccctgatgaccattatagtatcataactcgtaaagtatttgaaatgctgcctcataaagggttctcattaaaatgctgcctcgtaaagtaagggtacatccacacatatcattcaatctccccctcggaaacatcttcttcaggagatgattttcaatcaaatacaatatctcgttggaattaataaccataatcttaatgatcaaaattatatggttttcatatagacttataaatatcattatccagtgatattttatcatagataattgtcatcgtattacttatgataactctgtaggagttttaatgattttcaaaacaaatattagtttgatcaatatattttgacaaactcaatataaatatacatttatatgattatatgtcatgttatatatttctttttattcgatcgagtagagttctagagaacataattctcatataattaatccttcagagattatatctttcaagaatttcatataaatgtcatatccagtgttccgtgtcttattgccagactttagatacttaaaaatattacatccaccacaagagaatatatctcttcataataaatttcttatctttgtgaaaatctcattaatttcactattctttcacataaagactcatttatcttccaatgatgtttttatggttttacacatcatgtgcatagactactagtccaaatatctctactagagattataattatatgtctatttcttcttttccatttttggctaatcattactttgtgtacacttttcaatagactttctttcataatcctcctttttgtccataatatcaactgctcatagcatgcaaatatattacgacgtcgatttgcatttgattccattatattttgacatgacatagctagctagatctcttcattgtcaagtacttaaatgtttcatttgtcatgtttatgtctcttttagagatcattcactcttttcaagagatcatcaaaatatttatttcctcaatttggtcatttttaattttgtgctccttcacttttacgaggatatttatatttggaaccagggtctattacgctttatgcgatcttaagactcaatagcagtttgaaattggtccttacaggacattcattatattctggagcatttaatttacaactggtataggtgacttcatcactttatttgggtcagcaaatgcgtctggcaattacaacgctaaattctgtaattgaattatcttttggactcttaatatacattctttactccgaggatcattgataattcatttctatttatctttttcaccagttgtatacattctcccccttatgttggaatagctgactatataatatgatagtcttcaaaacggtatataaatccttctaggatggcttagttatcattcatatccaacatgtattcttatcctccttcgagggttcatctcaacgtgctgtggtggagcacttatcacattcaaagattttagatgaaaactatttggtttctgacccaaaaccaacaataatgggggaaactattaattattcattggcttgatgcgtatcgatgttactaaaccattttgtgtatgaacatgaatttcaaaatgttaaacacttatcccaacggatatccaataatggttataataaataaacactgaaatactcttgtactttaatcaagaaagtaacctcgcaaactctatgttgcgggtttataacaaggataaatatgaccttctagtcgatgcaacaatcgagtcaatgcgtccattgaatcgatgcatcttttatagccattaggtatctaaatgtcatacagtaggtgatcaacccataatcatctccttgcatatgcttacgaatagataaagtcaaaattattttgactggtataaaaatcacattatcatattgttttctcagcaagtaacaattgataaatcattaggaagaatcttctggtttttcacctaatgtccacataattctcaatactttcgcatcatcattaaaccaggatgaccaatccggttaagccaaatatactcttgaaacttctagtttttttttttttttttttttttttttaaaacttatgatttacttttcattgcttatcagttactcccttaatgagattttataatcaaaattactttcatgtattttaataatcaattatatgttaatattaggggtgggcattttaaccaaaccgaaccaaaccgacccaacccaaccgacccaaaccaaacccaagcttagactcaaaacttttatatttcatttgttcttccgtttatacggttaaatgatttttttgaaccgaactaaatctcaatcgaactaaaaccaaaccaaaccaaactaaacctgacccaaacgcaaaccaaaccaaattaacttcggttgagtatagttagaattttacaaaacccaaataaatcgaaccgaacccaaaccgaacccgaaattaaaccgaaacgcccacccctagttaatatagcaataaacaagacaataattgaaatattatattctagtataaaagatattaaatttaattttgactagctatgtaagatcttatattcacttcagaatatgagtattacttatcatcaaataactcatatattttctcagcctttgaaaaaacactcgattcataatagttcttaaattgtttttcaaaatactgtgtctacaggacaacaatacttgcgtaaaagtttaagcgtttgttttaccatctccgcatcagagatattctcttaacaatgtgagttatattcacaaagagacttcaagtcttgaagttttagtaataactaattataacttgcttctaataacacattcatataagagttgctttatacaacttttagatctttagtagtcaaagattgaacataatcttctggatatgtcacgtattatccatttattacttctcctcctcgagatgatgaaacttcaagttcatccatctcgtattgaattccactctagaatcataatgtattttatatctcatcatattaactttaaaatttggagaactataccgcatcgatgattttaattttgtattcccatagaaaacaatgtatatgctcttctagagtcttttaataagattttatactacttgatatactagattatttcatcgttaaaagttagaaattttacttattttttactatatttattttctcaacttctggtgataatttaagttcttgaaaaaactttgaccattaaaattatgatatcttcttaagatacattaaactagtcattcatgaaaatttctataagtgattatacctttaaattaagttatttataaatcaatttatttcataaaataatcaagtattatataccaatacaattttaatgcaatattgtaaaaccaatcagaataaaactattttgtgcaaaatctggattttacatatatcttgacaaaacttttatttaggataatatgaatttgtgcaaaatttgggtaaaatgatttcgtgcaaaattagggcaaaaccatgaacagttttttttctcttttaaaaaattaatacaaatcttttaaacaaatttttcgtgcaaatttagggtaaacaatattcataatcaactctattaacgtaaaactaataatgcatcaactatgaaattttaattttcaaagaagtattaatcttcaaaatccttttcaattaaatattctcaacaagcaaaaaaaaatggagagaacatcaacgaagttcgcttttgttgccttctttgttgttacattcggtaaaattttatttcatgtgtgaataaaattaaaaatctctacatgcaaattttatgtttataacaacaagttagtttggttttgtagtgatgtgcatcgtaactacacgaaatgttgaagcaaaacgtgtattatccgaagaaatgccacaaattgctttgcatcatgaagctttgcagcaaaatgcgaatcgatggggtcttgggtgcaaaaaaggatgtcatttgatatgttatgctcctgatccaacttttcctatatgtcgttgtatatgctagtttttatacatcccctcgtttaatttagtcaaataaataagatatgttttcattaataaaaaaaaatatttatacaaccacatgaattaaattggatttgataataaacatatggggatttctagccttcaagcagcaaaaatctatatagttgaaccggcatcgtttcaaatttataaatcggtgaaaattttattaagttcagaaacttattttaggttcagtttaaaaaagcgttagatggtaagcaggacggtgatttagcgcctaaaacgtttaatcatagtctaaacgattttagatggtttaagcgtttacaacataagacattataaatataaaattttaaataaaaaaatatataaaagtatctgctaaaaaaataaaaatattaaatagtaaacaaaaattagacaaaaatatatttaattaattcatattaaacaatatatattaagataaaacttattagttaaattttggagttggaaattaaaaaaatatattgaaaagaaatttatatgaatttaggcggacaaaacgattatatagatgtcataatatagatgggatttagacgaccgcctagaccactttagtaaccgcttttgcaaaattgatttttgatttaagaatattactcggttccggtttaattcggttaaaccaacaaatttggaattcaaagtaaacagctcacaaaatcacaaaaatcatgtcttgacgaaaatttcctccggcgactcatcgggaaaaatctcaaaagcttccgcatcaacaacaatggtggatcatcatcatcatcatcatcatcaacatcgacctaatcgtctttcagtaccacaaccaacaatcggaagaacatacccatcattcccttacactccaactccaaccccttccaaaacccgtctctcttcttcttcttcctacagatcgatccatggaagcaaatcatcactttcatttctctttctcattctcttctctcttagatctctttactctctcttacctttccttcgttcttcaccttctttctctcttttccctttctccttcctcgtctctcttctctctttcctcttctcactttctttcactatcatctcttccttttcaccttcaaagaaagacccttttcttctccgtcttcaaaatcgttccttttcctcaatttcatctctttcttcctctcaaatcaaactcttactcgctaaatcattccttcttgctttcgtctttcttctccgttttcaagctcttcgttactgtggtgctgctgctatgatcttagctgaactctctggcacagtttcagccagagtcttgtttagtgatactggtggaattggagttagatcatctaaggttcgtgggttttgcgttttgtttgctgggttgttgttgttatcaatcagctgggatcgtgttgattgtttcccgttttcatcatctgttgaaagttggggtttttggatttaccctaaagagaattgcttgaggatttggcctctgttgcttccgtttctatctggtttcttaggttgttatgagaaagtttctgtgaattggaatgagatcaaacagttagatcagaaacgagttcgattactgtctttgtttctaaccactgtgttgttgttcccacttgctatttggagtttcttcttctctggtagtggtgatgatagtgtctcttttgggaatttaggttggcctttagctaacactgttgtatttggagtgttgttgagtgagaattataatgatgataagttttcaagctcgaagaagaaggactcagagagggagtttcttgtaacgtttctatgtactatagtattggaactcttctattttcctgagctatctctttggggattgttgctttgtggtttgttgctttacattgctgttagagagttggagtctgtgtattcagattatcaagagattggtatggaatcgcctgagtcgttttccactatgtttatgaagcctatccgtcacattttgagcgagaagaaatcgaggaagattgcgttgtttcttttgattaatacggcgtatatggtggttgagtttgtggctggttttatgagtaacagtcttggattgatctcagacgcttgtcatatgttgtttgattgtgctgctttggcaattgggctgtatgcgtcttatatctctcgtcttcctgcaaaccatcagtataactatggccgaggtagatttgaagtgctttctggttatgttaacgcggtgttccttgttcttgttggggctctgattgtgcttgagtcgattgagagaatcttggatcctcaggagatttctacaaatagtcttttggttgtttcggttggtgggcttctcgtgaatatcgtcgggttaatctttttccacgaggaacatcatcatgctcatggtggatctggttgcacacattctcactcacaccaatcccatagccataaaaatgaggagcatcatcagcattcagatagccataaacatgaggaacatcatcagcattcagatagccataaacatgaggaacatcatgagcatgaccatcatcatcattcccatagccataaacacgaggagtgcaaccacaaccacgaccatgagcatcaatcccatagccataatcacgaggagtgcaaccacaaccacgaccatcattctgatcaccaacctgaaaaaagcgaaaagaaggagcatcgccacattgatcacaatatggaaggaatctttcttcatgttttagcagacacaatggggagtgttggagttgtgatatcgacactcttgattaaatacaagggctggttagttgcagatccagccagctcaatctttatctccatcctcatcatcgcttcagtcattccgttgctacgaaactctgcggagattctactgcaaagagtccctagggctcacaggcaagacctgaaagaagctatgaggaacatacttaagactaaaggtgtttgcagtatccagaggctgcatgtatggagtttcaccaactcagacgtcgtggctactctccatctccttgtatctgcagattcagacaagacggatactaagttacaagtgtcacgtttgttagaagatgcaggagtaaaggattggacattgcaggtggaatctgttaactcatagcaattgacatggaagacacattaattgtgcttcttgatcattactatcttagagactgaaacaaaattttcagttttgtgttatgaaaaggaacttattataaagttgtatgatttacaaaacaatacatttcttaaacagagaatccaaaatagaaatacattattgatattgacattacatcggtgttatcccccgatgatatcccaacctacaagtcaggttcccttagtgaaagtaaaaaaaaccaacaaaaactaactaattatctcatttatatattcaaaacactcaccatgagaccttctttcactgccaactctctagccatgtttacagaatcctcactactaacctgtttagctcgcacgtattctcaaaagtcaaaacataagcttttaagttaatagaatattatgaaaaaaatggaaggtctagtagccttatacattacctcaacaactttgtccataacatccatatccaaaatatccggtttaaatccaaccccattgcccgtgatctcatgtgggcctaactcaaagttcaaaactctaactttagcaccggcaaaaaacttggatcttacactgatttagaccatgatgaatcaaaagaggataaaaatattaaagattcaaaatttttgaagacatatggatgtcagagtacaaggcgattctttgacgtggcaagctgcgattagttgctagagtttcagaacgtaatatgcaagtattcaagttatttaagatatcttagaattaggaaataggttaatgacgcttgtgtcattactcatataatcagaatttagattttagatttaggtagccgtcttatatcacaactcggtgaatcacaagttctaagctagaaattattagggttcttggtgagtgaacagagaaagatacatagttgttgatgtgttgtgagtttgggtaaattagaaattggtcagtaacgggttgtgttaacaactcaacacagtgtaaatctgattaaacagatctgatagattgtttaagtgatttaaaataaagaaaataagttcttttcaacatatcgatatctctaatattctcattttaatgtgatcatggaaagcacaaaggacttggaatttgatcaagagcttgtagccgaggaagagcttgaagcagaggagcagcttgaacctgaggagcattttgaaccagaaaacgagcttctagcgaagaaagagtataggaaagatgttatcttaacctcgttggttttgatacatgatcatcaaatgggtatgtgtcttatttgtactctttttccgttgtcaagttttgtcccaatgggttttcttgacaaggtttttaatgaggcaaatgattcacattcaaatcacccatttgatgatccaaaccatggtataacattcagaacttggactcaaggaatatatatcaagtctaagtcattttatgtctattacaagcccaagaagagcccaaaccaagtgggtaatttgatggtcaagaggagtgacgaaaatagaagttcaagggtcatttttgaagccaaagggtcttttctattcaaattctatatttaattattatgttgtgtttctaggcaaccttcgagtatattccaagatttgtctctttctcttctcttcttcttcttctttataaactccttgtaatctcttatgagaactcatctatctttttatcaaaaactctctcttaaaaatagatcatggatccattttcgtatgtcgaattttgatctttctcgacttatcaaaaggcttttccgcatccttttgtggcgtcattcaatccatcatctcgtctttgagtcgtgtgtcgtctctatttcgagaatatccactccagatctttcaagtgccgaaattgggattgattcctcaccaggatcatatcatgtggtatcagagcacaaaggacaaaggacttggaatttgatcaagagcttgtagccgaggaagagcttgaagcagaggagcagcttgaacctgaggagcattttgaaccagaaaacgagcttctagcggaaaaagagtataggaaagatgttatcttaacctcgttggttttgatacatgatcatcaaatgggtatgtgtctcatttgtactctttttcccttgtcaagttttgtcccaatgggttttcttgacaaggtttttaatgagacaaatgattcacattcaaatcacccatttgatgatccaaaccatggtataacattcagaacttggactcaaggaatatatatcaagtctaagtcattttatgtctattacaagcccaagaagagcccaaaccaagtgggtaatttgatggtcaagaggagtgacgaaaatagaagttcaagggtcatttttgaagccaaagggtcttttctattcaaattctatatttaattattatgttgtgtttctaggcaaccttcgagtatattccaagacttgtctctttctcttctcttcttcttctctttataaactcatgtaatctcttatgagaaactatctatctttttatcaaaaactctctcttaaaaatagatcatggatccattttcgtatgtcgaattttgatctttctcgacttatcaaaaggcttttccacatccttttgtggcgtcattcaatccatcatccgtctttgagtcgtgtgtcgtctctatttcgagaatatccactccagatcttccaagtgccgaaattgggattgattcctcaccaggatcatatcacatttggtatcagagcaggtgaccgacctgagtaaacacttaatacaagttgagatcctgcggattaagggtgtcgaagtcagaactcatgagacctgtacctctcgatcacaaaggttatggttactggaaaatacggatgatacaactaatcagaggagaaggagaagatgcatggactgctctagaagatggctgggaacctcctttgaccacaacagaagagggtcttaaggtgttgaaaccaaagccaaactagactgagaagagaataatctgtcaaagtttaatggaagagctatgaatgttatctacacgtgcctagatgacaatgagttcaacctggttcagggaagtgaatcagctacacagatatgggacatcttgcaaaaactgaatgaaggagatgtcagtgtgaaacgaaacaatttggatcagcttgctatagatttcgagaatatgaggatggatccttcagaaacgattgttcaattcaatgcttaattgagtaaaattgctaacaaagctaaaactctgggaaaaatgtacaaggagaagaagttagtgaagaaacttctctaatgcctaccacataagtatgctacacacaaagccatcatgagggtatcaggtaacacagatacacttaagtatgaaggactagttggaattctgaagtctgaagaaatggaagctgctgaagatcaacgaaatctgacaagcttggaactcttgatcatcaagtgatctaaagttggattagctccaattcttgctctaataccagatgatgcaagaatcggagctaatccaactttagatcacttgatgatcaagagttccaagcttgccatgcggaaggtgggatgatgaaggtggtgatctgacaagttggcgatcgcttctctcgtgtgggatcaattcaagagaaaatgatggatagaaggggtgattgactcgctcaatcagtggggtaatcgactaactcgatcaatgtacgaatgaaggatattgaatcactcaacaaacttaatccacattcccgaagtacttagtgactcactcacaacgaactacagaacaaatgacaaagaatcaaactttgacaagttgaaaacgtttctattaattttaaaatgatcaagggtgctttacaatgaaatgagaaatgagcttatatagagctgagtacaacgttctaaaacttcaaagaaagaaacaaattaaaacataaatgaaaatattggacattaattgtagaatatgtccaaataaggcaagtgaggtgtgctttgtatcttgtcaaattggggaggaagttctgacgtcttggaaggttctgaagggtctcaagattcttacataagcgcacaaacaaagtaggaaagagttgttgaaattgatctccttctggtccatgtatggcaagtagtaactctgcgggttcttgtgtggtaagatgtaccaaaattcgtgtgtgtgtggtctagatgttctcctggtttccatatgtagctttgaggtgcgtccaagtgtagaataaggaaaatttctttgtttgccttcatttggtgtggtactttaaaaggtagttcaacgggtagatcaagaagtagttcagcgagtagttcagccagtctgtcagcaaatacatcagatatatgtacttgtgatatcttagaatcatttgcttggtaaatgattccttgatgacttgatgttgcctcgttaaaaacctttctaggtaaacccattgggacaaaccctagataagggaaaaagagtgcaacagtcatatttccacaatatggtgacccggcttgctggtatttgatccttcttgaatcatcattagtcttcttatggttaatttgctggtgaataattaaccttgtaccttgtgcttaattgagacttattgggcaagagttctccaaaatgcttcttattaatcggtttgatgtatgtaccgactggtttggtatgctcccggtttaatttgatttggatgtttgtatcacccgtagaccaatgacgtgaaccgtcaacggcgtagcacacaaagctctcagttaccaactacattcgcgtcacgtgaaatcaaattgatgaactattcataagctctttcagaacggaaccaaatgaaacaaaggaaatgataacactagcttaatctaccaatctctttccctaaggtcggttgacacatttgattggtcatactagctcttccaaacaccaagttatctaataaaaaaatcaaagcacaagccaacacaaatcaaatctccatagaggcaacaaacattaatttcaacacacgaaaccagaattaggcaacgacaacaaaattttctacctaatgtattctataggcaacaacaacaagaaacatatcaacacaaattaactcccctaatatattctaaaacactttatttctgcctataataataaaatttgtttcatttggcagtgaccatagtcaacatctattagtatagtcacgttaacatgtgtgtatctattttgtctatttacatgatagcaaatttttaatgtcattttagtagcaccatttatctaccaaaattgacacctcataaaagaaaaactgaaatttgcaagaaggcaagttttgtctagaagttcacactgatggtcgaacacgtaagtcaaagttcttgttttccttcaatgatatgatttaattaaaaaaaaaaaaaccataattctatttagtgaacatgcgtgtgagttatgtatatacatataaaacaaactccaaactaggacaagagttttaaagttcatctcctctctcttttctctcaaaccaagacgcagaaagaaaaaaagaattctccacaagatgatgaagacgaagaggagacatgaaagagcacttacatgtacgtacatattggcatatttatacgcataatatccactatatatatacactctcaccggtaatgaatgcgaagagatgcattagaggctacttcggtgtttcgccgggaaaataaaagttatcatgagtcgtcggcgtacatgggaaggccaggcatttttggtttaatttttctctctctttctatcatattatgtaattctttttatgaaaaaatgtcatattttcataaagtttctattgttgttattcagattatatcgcaaacaaattcgtaataagatgaaacgatggaaatgttttcctactttctgtgtttttcatcttcttcctacaacattcacatttcttgttgtaatgtgaataagaattaagaagactacttatatattactatatagtctatatatatatatatatatttatgaacaaattaatatattgtcgttgtttcttacgtaattagttggttcaacgtcaaatcaattggcaaattataacatatgttatccttgtttattaaaaattatggtgtcgtagcagttacgtagctttccttgtttcgagcattcacgctacgtacatcaataataagtattttgtttctataaaaacaaaatctactgtatattgacaaatattcaggtgctgaaacgtgaaataataaatatgtaggtataatggaaagtatactagaaatttctaagaatttaatactttttttcaatgatatgtgtgaactcgaatgcgtcttgaatctatgatatacaataaatgtattcttgtagatatttcaataaaaaaaaaagacacttgaagtctttagaaaaaagagtactaaaagttaaatccaaatggttttaaattgaacaaaatttcagcctctttgatttatatttctacttttttttcatttaaaatgattttaaggtttttgcaattagtaaatcgttaatgttaaatgattttataattattcacctacttaaagtattattcgaccaaatgaaaaaaaaatagaagaatagaaaacaatactaaatttttttaaaaactaataaatcgaaacaatttctttttctcttaaaacatcaattattatgaaatggagggaatgaaattatatagtttggtttagttagctaagggacttactacatgtaaactgataactaggtaaaggtctatcataagttccaaaaacaaagctaattaagatgcttttggttgatattttgtctgctacaagaacaagtgggagtatggaataagggcttgacaaaacaaacatacaacgaatagtttatccaaatctaaatcctcaaactgcaatattgtagttatactacaatacaattgaaaaaaaatgaaaacaagaagaagaattgtttagatattttgggccaatgaatattattgggaggagacaagaagagaaggaatggtagagagggaaattgccggcaactatcaaaacaggacggcacgcattgcgcccgagggggctcttcattgttgacttcactctcgtttatttttgtctttcttactaaatgatttgtttcttaattaatttgacatgtaaatacattaatttctttttacaatttcatctcgctatacttaaaagtgcataagataagatcgttgtgctcgttattccatacacaagtatcaaaattttttttctttcatctatttcaagtaatttatgataagtagattataaatgaaagaagaatagtgtgattaagtctcaaggtcaataaaatagcttttaaagagagaccggagactttatatctattctctctttagatatttgagagaatgaaaataatttcggtttgaaaagtactccgatataggctagcatttttagtagcgatgttcggcttctctacaatataggcttgcttttttagaagcattggtcggttttattcaggcataggcttgctttcttaacagtgttggccgactctcttcctgcattgactagctttacaatgctttggccggcttctgttttggtgtttcatagttgggattttcattttgaaatcttgaatttatggtatgttgtagtttggcttagtttgttgtctttgacctttattgcttgatgtatgcgttctatatcttaataaaatacaaaaatgaccaaaacaaaagagagagaacttgagatatagtattaaaagttaaaattttgttctttttatgtatatattgtaattttgtaacactatagtttcagaaatatggtgatgcatgcagagagatttaaaataaggattaattatgagaaagagatggaaaaaaataagaaacttacaagatccggaactttcgtatgtacttacgaaaaccggcactttcttctatagaaatagaccgttctacccttcaatcatcatgtagagataagaaataaaatattaatttctttgttgcagactgttcaaatttattcatcgtcttctatctctacttccagttaattgcatagttcaatttttgccttccctctgttacgcatcaacaccgacgaagaatttctctgattcataaaaaaacctaagcttatccgttgatctacttcgtcagtatcaatccctttcttttaattaaaaaaaagtgagatttgcattcatagcttatcacatacagccaaattactttgccacacttatagaagatgaagattggggtttcatagtggatttgctattcccgattacaaatagaggtgaattgttatgctttgctaaataattcaattttaaaaaaatatttacgattgcatctgaaacatttaccattgttcgtttgattttttttcttgggttccctttcaacatccttagggttaagtttctgattgggtttcccttaaaatccattcacaagatgatttcaattttgaaatccagacaacaaaacacctaaagcttctcaatttctaattaatcccttttgattactttgtaaacaattaacaattacaaagtaatcaaaagggattacaaacaattcatttgattttccccttaggttccatatttactagttctcttagggattagtttctgtaaacgcaatcgagaggaaccagttcactatgtacacatctaaaacgtataaagtctgcttgatttttttacttgggttccctgtatagtatcatctttagggtttagtaatcttgaatcaatggggaattgcaactataaaagatttttgggataacagattttttttttgcagaaaagttggattgtggagaagaagctgcgaagatgaaggaggaaagagaagctcagatgaaaggggtaaaattgtcaaattccaaagcccaaagtccctttttttgaagcacactctcaatgtgcctaaaatcagagtttttaataaaattatttctattttaacaataagcccttaaaataattgatttggcaatctatgtcaccaaagtgcatttatcttttcgatcaaacgttgaagagaacttcaaagctaagcatgtttgggatgcagcaaattcaggatgagtgactttctggaaagtgattgtccgaaccgtgtgaatgaggacaaagcacaggaaaatatcatgtggtgatttgtaagggtggtaaaaaatcttaaagcctctcgtacatagtgaaccgacagttggacagtggtagagcccatagacccgagaaaggacattaatgctcattagtagaaacggtcagagcattacaaattgtgtcaagctctgatatgcttttcacatgcttcttaactacttttaaaaattggtcgatgcgtggttagtccatgggcacaagagtgaataatatagtttttagtattcatacctacttcatatttttttattttgaatatatgaaagttcaagtttgaagaacctatatctcctagaggcgggacctacataaggttaaattcatcttttttgtacataaacaagtagacatgtttgccgccaaggaggtgcttaaacttggaatacgtaagactataggatcgggttttggaacttgcatctggactgatccttggataccagattccccagcacgccctccgaagggacttacttcagagagagacccgcttgtttatgtcaattcattgattgattttggaacaaaacagtggaagatggatcgtcttcgaaaattattcccaccagatgaaattacctttatattagggataaaaccgagccttaatgtctcgagtgatggatattgttggaccatgacaaagtctgggaattatagcgtcaaatctggatatgaagccgcgagaactctttctcaccctgtttgcgatcacccttctcagggacctagtgttacggcattaaaggcgcaagcttggaaattaaaactcgaaaattaaaacatttcgtgtggcaatgtgtgtctggttgtttggcttcgtgccaacgacttttctgtcgccatattgctagagataatggatgtcctagatgtagagcagaagaagagacgatcaatcttttgatttttgaatgcgctccggctagacaagtttgggccctatctaacattccatcatccccaacattgtttccttcagcttccctccacaataatttagattatttgtattgggggtaaagaggtgggtgcagatgaagaaagcataaggatatttccatggattatgtggtatatctagaaggcgcgaaatcgaaagatttttgacaatttgagtgtaccacccaaggaaactttggacttagcaattcatgaagaagaagaatggagacgagcaaatcagcgagaaatccccttaaacgaggcaaaccccactacgccggtaatgacggtacctacggataatcttgtttgttttattgatgggtctt

SEQ ID NO: 168 - DNA, 116217 bp, Arabidopsis thaliana
gaattcttgctaaagattttttggtattaattacctttttataacacatatttagttgagtaatttatcattaaattcattgtcttttcttgtatgaaaatatgattaagattttttcttttattttagtttttaaataattttgaaatagataaattaatgaaaatacaaaactttaaaacgaagaaatgcaataaagtgtggatattttatttgaaaatgctttggaaaatttgtctttggaaaatttgttatgtcacgtatagtacttgatatgagatatatttctttttaatataataatctaaaaattacaagcgattaacttcaaagtaatgttaaaaacaaattcaaaaatttcaaataaacactatatattgcaaaggttatggagacttatctttgatattatttatactcaagtcataaaaaatgataccacaaccaataatctctcttcctcctttctctcttcataatctctcactagtctcttaaggtttaagtaaacatttgttggatttctacatagcatatatcttagtaaggattgatatgtttcattaaatgtatggatgttaggtacaccaaccgcaatagctcagagaagaatgcaatgatatgccgccaattgtgcaagcaggaaagctctaagggaaaaaaatgccattgtatcagttcatcaactcatcctgcaaaacttgacaaagaaaagatggtggaacatttcaatgctcaaacgctcttccattagtgcctcccagagtcaggcaacaagcaggaggggtacaaccgcaacagaaccagtcaattctttgggtcttcgagcagctgtccaactggcgtcagtattctgcaggctgcattggatgcaggtaagtgtgtacttccactctctcactttctgtctttccctgctggattttctgggatattatatcgaagaatataggagatattatatcgaagaataaggaaaggaataggcttggaaacaaggaagattccatatcgagagattcttggagatcctaaggttagggttctggagaattggtataaatattctagagcagagggtgagccgctttgagcactctgggatatttttcgatacttagtaaaaacttcaaagccgtgcaaaagcttgaaggtgagtgtgtagttctctttgtcttcacgggttagtgataataaacagagaagagaattagagcttagttattcttagtcggggttgatcttttgggtagaatagatcaagtaaagaccgagataatacttgtaacagaagtttattatcaataagaataagttttttaagcagttctctgtgttgtgtggtatctataccttttagatacttggttttggttttcatgaatgtgactcatgctaatatctgatcattgttttttattattattacatgaccagatttaaagcaacaaggagagcctctgatctagaaaaagagataaaaaacaaaaaccgagtccggcgaagcttcttttcttgatatatgtagcctataacagctgatgtgatttaagctacaaacgaaaattgcatcatgtgtggaatggatggttatgtatatcaaaaccgtttgaaaaggaatcacaaagtaattaacaagtgatttacaaaaagaaaaatgcgtaacacaatggatagataagcaaatacgtaacagaatcatcagcattcaaagacagaaagaccgtcgataagatgctagcttccaaagctgactccaaagtcagatttaaatttttgttttctcataatctctgctgttaatctatctcctatataacacatgatgcactagttgtaacaacgttatttactttttgaatataatttaatattattttcaacaaaaaaaaaagttacatttgtttagaaaaacaaaaccgaagaacgaagcaccaagataacatttccttacatttcaagactagttttattattttctttgcttttacattgctggatttgaaccaaacttggaacataactgacaaaatatggactacatggccaatttgtagattccacagggacttctgcataatacgcattgtacgctccaataatgtttaccatgttctcattaccccttacagtcgatatgacaattttcttttcctcatcgatcagaaaactattgcaaaacggtaaagaatgacacatactaaggattttaaactccacagaaaagtacctcttccaggacatggcggtttcactatcaattctattggtcatccaaatatccatctttgatgaacaaaagttctgatgtgatactgagagtttttcttctctaacaaccgatagaaccatcgtatcacaattcttatttgagggaagacacaaacgtttaaatctctccattgtaaaatcaaaaccgagtaagaaatttgtttcttcatctaaagcaagccaataagtatttcctttgaaagacacaccattctctgattctatgagaaagtagttgagagagactttatcaataagaaccctccatgaatcagtggtaaactcatagatattataccttaggccaatatggtttggtgtcaaataagatgtccaaaacctcaagattttgtagctacggcatgatttgttatttttgtatcctagagaaaacctagaatatggcttgtaatcattttcaaagttgatccacctggtttcccccaaacacggattccaaactaagagtctatgatccttggtggtgcataacaacaaaccatcgcagtgaaaaactttggctatatagacttgttctgaattataatgtgaatcctttaggctaagtacactcttaaactctatagacgaaccagaaaagttgagattgatgctcattggacaaaccgtataatccttccataagagaacatgagactgctttggagctttacaaaagtgcttctctgtgaatcttcggtttttgaataaagagttccattgtttgcaagtaaaccgtaatcgtttcagagatgtggctgggaccctagagagtatgtcttccaccaaatccggtggaagatcagacattgtttctcttgtgaaagaagaaagcgactcggaggcttgtagtatagatattggggttttgagtttttcacccttcaaccaatctttgtcttttatacaaacaaaaaattagggtgttgattaattaatattaaatagacttgtatataaaattataaatgttaccataaattattttcatcaccataaatattctaaacttgttagatagataacatattatttttcttttaagaaacaaaattaaaagaaatcttaaaaatttattgcataagttttatatcaaagatgacagatgtaaatgtactatataatgacttaaatttacggtatttaatgatcccataggatttttacatcccaaattaaatgaggcaaatttaataattagtttttaacatattcacataaaaattgttgcattaaataataaatgtacatcaattacaaaattgtgtattaattcgttttttttttaatttaatattaaattatatttaaagaaaaactaacatttttacaactagtagtgcatcaaatgtttgattaactttgaagctaaaattttaaagaatttcgagaactataaaatactcaacttcgcatcattgttgagaagatgaaaattttcttgacaaggatacgcagataaaagtattattgcatagacgcagtttcacaaatgtctatgaatcttcttttcataatagaagtggagaaccaacaatggtgatagcctataaaaaggcacctggtgatgtgttacaaacaaccatatactaggcttgtcaagccagtggagcagactgcaataagattaaagcctaaccaaccttagcttgtttcaaggccagcaggccaacactatcaaggaccatgccttcgttgtcttcaataattattaccagcgttataagcacaatggaggttctagttactttaatggcgcatcaccgattttttaaaaacatttatctatttatgactaagaggttccgagctaagcacatacattctcacaagctgggaaccaaaacattttatttggtctgcacattcatcctcttaggcgggaaccaaaccattttaatttatatggttctctcccgagtgccactcaaaaatgatcatggattgcgaccctagtatgcaattctggctaaatcctttggttttaggaggcttaaagttctgcttccaatattgttgtgtttcaaagttggtggtgcaataaatttcacctacatatcttgttttactcatttgttatttttggtgcacatgcaataaagattagatgtttcacttttctcttcttctccagctaatgaaacagatattatattcaaatgtagaacttcaataagatatatggtattaaaattacatcaatttggtaattgacattatccattctgaaacaaaataagctatatatgataagcttgaccacattccatataacataactcatatatatttgaatcaaattcatagtcaacaaaatttggcagttgatatgacttacacctaaatataagatcttacataattcattctttattttgttggtcagagtataatccattctaaacacagaatactaacactataaaatactcgagttataaccatctttaagctctcaaacagttcaacttgcctcttgtaaaagatgaaaactttttgtttagggatagcaattgctctacttttcataacagtaacgttttcaggtacaatattattgtaacatacacataatctcaaagatctctataacatggggtatcttatttttgtagcgaaagcggagttcggacaatggtgtgtagccgatggacagataccagataatgtgatacaagcagccgtagactgggcttgtcaaacaggtggagcagactgcagtacgattcagcctaaccagccttgcttcttgcccaacactgtcaaggaccatgcctctgttgtcttcaataactattaccagcgttataagcgcaacggcggttcctgtaacttcaacagcactgcatttatcacacaaaccgaccctagtaagcaactttatctaaaccctttttgttacagttatttaagctctttgatcaatcaaaatcttgaaccatctgtttctgattatctcatgatttgataggtcacgattcgtgccattttgagtatgtgccattttgagtatgtccaatgattcaaaggaaagaccaagatgaaatgaaagatgatgaattatactaccggtgaacaatataaacaaatctttgttggaacttggaagttcttgtaatgtagaattttgataaattgtatggtaataagattacattaatatggtcgtcatttacataatccctttagcaacaaactgaacaagtaaaggaagatgcttaatggttgtcgacacagaattgttattaagcaatctcttaggtaaacaaaaaaaaacagtgagttcatatgtaggataagcttgaccacaaacttgacaatatagatggttatgagattgtttagaaaagtaaagttgcccatgcagcaatgaacgcaaagcctccgaatggtgccaatgtcgaaaactttctgtcctcccgcagcgctaccatataacacctgcaacaacatttcaacacacatgaaacttctcacatactcatacccggaaatagactattgaacacaaaactaaagttatctactaagcatctaaaatatagttacttctccaaagagcataccttcacatatcaaaggaagtacaaaggggacaaataccattcattaactcaaatacaaagacctatgctattaaataagtgatacaatggtttccaaatgcttcagagttggacacatgtcgaaatcgataaaatctccctagccacgaagaattgtggcaagtattgctactgctagagattagatatgaattctagaaagtccaaatcatatctaaatagctcaaatatccatgaatgcactactataacctcaatgacaagacatccaacaaacatctagcacaaaagctctaccatacacatctcaaactgaagaatctgagaaacaaaaagataacaacttacgtgccggaaaaggctacaattccagcagtcaacaagccaccaaactaagcaagaaaaagatatgtcagctccatcaactctcaaaggacaaagattagagaaacagagtacaagaagagaaagctaacaatgttgggatatttggtgctaggagcagaaacaagagcagcagtgtgaaccaaatggtaaagtgaagccgtttgccacacctgaacaacaacaaaaaaacctaaactttctcacagaaatccaacaaagtatcgaattttccaacaattttcaagaatctaaacctgtttgtaagaagggttctctggtttaaagacatgagcaccataagttcccaaaccaagagcagccatacctaaaccaattctatccgaatcagtacctttcctcacaagatcaaaatcaaaagatcattactttatcttaaatctcaccggaaatagcggcgactttgtgccacatccgaggatccatcgatcgtcgtcctctgatgtctcttagattgcttcttacactatttcccatttgaccagagactttaagcgagatgtgtcaagtcggtgatcgggtcttattcggtttaagcctaaaacgacgtcgtatgtgatgtgttattttcttcactacagcaactaaaaagattcttccttttgcttcagctgcgagctttggttggatctctcacttgcaaaaccaaatcccttatcgacttccaccgaaagatcacttcttaacctacacaaggtttgtttttctcataaaaatcaaacctttattctcttttcttgatgattttgatgctctgcttcttcttatccacaaaacatgaaaacatttcttctttgataagtttgatgttggtttgttgtaaatgattgctctttctagcaagctttactctaaagtgtgaagagaaattgtcaaattagtttgtttaggattggaactcttgtatgccttgtttattgatgaagtagttcatggctgacgtagattcatagagtcatgagttgatttcaatgatactagagttcttgttagagttttgatctccatggatattattgttcaatattgatatctaattcagtctctgattaatgactttgtctatgaattctacaggtgtttgttatgaagatcagataaataaaaggtcatttgaggataatggttgatgttcaaagattcttacttgcttatttgtgatggacaatgtaagaggttcaataatgttgcagccactgccagagatagctgagagtatcgatgatgctatctgccatgaactctccatgtggcctgatgatgctaaagatttgttattgatagtggaggcaatatcaaggggagacttgaagttggtacttgttgcttgtgcaaaagctgtttctgagaataatcttctaatggcacgatggtgtatgggtgagttgcgcggtatggtttcgatttctggtgagccaatccagagattgggagcttatatgttagaagggcttgttgctaggcttgctgcttctggtagttcgatatataagtctctccagtccagagaaccagagagttatgaatttttatcttatgtgtatgttctgcatgaggtttgtccatatttcaagtttggatacatgtcagcgaatggtgcgattgcagaagcaatgaaggatgaagagaggattcacattattgacttccaaattggacaagggagccagtggatagcacttatccaggcttttgcagctaggcctggtggggctccaaatattcgaattaccggagttggtgatggatctgtcttggttacagtcaagaagagactagagaaacttgcaaagaagtttgatgttccattcaggttcaatgcggtttcaaggccaagttgtgaagttgaagtggaaaatcttgatgtccgagatggcgaagcccttggagtgaactttgcttacatgctgcatcatttgccagatgagagtgtaagcatggaaaaccacagggaccggttgctgaggatggtgaagagtctatcacctaaagtagtcactcttgtggaacaagaatgcaacacgaacacttcccctttccttcctaggttccttgagacattaagttattacacggcaatgttcgaatctatcgatgttatgcttccgagaaatcacaaggaaaggatcaatatcgagcagcactgcatggcaagggatgtcgtcaacatcatagcttgtgaaggagccgagaggatcgaaagacacgagcttctcgggaaatggaagtcaaggttttccatggcgggttttgagccataccccttgagctcaatcatttcagccaccattagagccctcttgagagattacagcaacgggtatgcgattgaagaaagagatggtgctctgtaccttggttggatggaccgaatcttggtctcatcttgtgcatggaagtgaaagaataaacgtctccaagaatgtaatgcaaaagacagaactggaagtaatagatagttttgtctcataaccattaataaggttgaatcaaatcatatacatccccatgctacaactattacacaggctccatcaacaaagaagggctcttgttgtgttaccttctcttcctgtaactcttatttgaaccaaatggaagtggttacataaaggtattaaagcatactattccattaaacactaatctaaatctggtcccgcctgaacaacaactgtacagtctataaccatatcgcctgtactaatctatgttaaaacagccatataaattaccactcggtacaacactgaatgcttagctttgggcaggctctgtcttgggtttttgttcctcgctctccagggttcctactgccttctcttgacaaacagtggttttatcatctgactttgcttccggcttggcgtgattggctgcgtgatctttgtttgcatctgatctctcttttatttcctccttcagcttctcatccaaaactggaccttgatcaagacttttctcaaagccattagtcttcgttttctttcttaagtgatcttcgacatgctggtcttttgtaatggattgaagagttgagctctgtggagtcttgttggcatctccttctttatcatcaacttccgagtccagcatgttattatgagtaacaactcttcctggaggcatatcgtggtcgtgttttccctcgtaagttgttataagcaactttgtgtcatgagatgacctctctacgtgtttcttgacggggcatccagggcttgaacatctatagtagctcctaatacataaaacatcaaatggagaaagaacgtgagcagcgaagaatgaaaccaaaagtttgacattatatttcaaacatgtaagcagtcactaccttggatatgggctgccttttactgatttctgaccatatttacgccatcggtacccatcattcacaatatcaaacagagtctgagtgtgaaccacaatgcgtgaatcattggttgacctctccactggactcagctcaatgttccctcctttcttcctgatttagtgacatcaacataagaagaaaaaacaaggaacaccaatggtgaagtcttcctccagaaccatgaaaaacaaaccgacatatcaatcatcaataccttcgctttgcggtaggactattataatccttgtgagtgttgtcccccgttatcctacttgattgtgaaatatcagttttcacatcatcagctggtggaataactgaaacatgtaatcctccatggatctttggtggttcggtttgacgaagtgtctgaacactggatccagatgttttctctacaaacatgatatcataagaaacaatgcacagcttataaattagagaaactatatctattctttgttcacctttactaacagctgtgaagacatcacttcgcttatcctgattgataggaacagcaccagcaagaggctttgggtgatcatgttccccaaagtaaacggtatccacgacttgtccacccgcagaccgttccaactgttttttcgctttgcagttagggtgagtgcacctgtaatagctccttacaaactcatttcctttcacaagtttctgtccatatttccgccagttgtatccgtcttccataaccttctcacgaataaaaggactattcccttccgaaccagactgcaaagataatgcaccgctactttcagaaaccttcggtgctttctcggataccggggaagcaacatctacttccgactgcgaagctaccgtatgtggaacaagtttttcaagctccttacagtcagtagattccaaactttcaacaacggtttcagttctagttacagccactggtatgacctccgctttatcagtagtggcaacaacatcatccactgctttagtctcatttgaatggtctaactccatatcactagccagaacttttcccacctcagccataaatactaacaaactcaagtaaactcaaaaccggagagactcgagcttaaccccaaatatatctaattcccaaagcctgaaggagaaatcaaaacaaacaaaaaccaaatcattacagtgaattcacactaaattccacagaaacaacaattaggaataaaatgttgcagaataaccactaaaagtctccacttttgggaaatttctatatcaattacaatcttagtaaagactcaaaattgattagtcctatgcttcaccaacgatctttagactcaagtactttactttgaaacaaacaaaaccccaaaattaaagcatttgctaaaatcttataaccaaattacataaaaagtcggcaaatttgttccatttactacggagttaagagacgacccagtaacaagattcgcataaagattcaacatttaatactaaattaaagaatttaatacaacttcaaaaacaaaataaaataaagaatttacctagcacagacatcgagaagatcatcatccgaccaaataagataatcccaaaaaaccgaagctgcttatgttcttgtaagaatctcgtagatcgaaatcgaacaatctcaaattgggtttaagagagagagaaaagagaagaagaacaaaaggtcatgtcgaagaatcagatggttggacttagaaatgactatggagaaagaagaagaagaagaaagtggggaagagaggttttgtttcagtgttacgcggtgtattgaaagatatgtagacgtcgttgatctaacggttagatgatacgtttctcatgacatatattctccacccacaaaacgcaagccgacaaaagcagaagcagtgggacccagagaacccagtgcataataatctcgtgtgtctcattagtattgttgtttcttggttacaaagtgtgagtaatatcaaactttggggatcgattttgcaaatacatgtaaattacttaactacgaggaagaaaacaaaagtattgattcttacacaagtggatgtatatctttttttaggactacttttgtttaagaacttgagtacgtttgtaagaaaatgtttaatgaaaaggagaattgtcaaggtcaatttgttgaacaaccactgatcatctagacactttcgactttaggtaataattttttaaaaattcgattttttttttttttttgtttttttgtttttccttacaaaagaacaaatggaaaattgtagtgattaatactacatttttaacgaaattagatgagtagaaaaacagagatattaaaagaagatttttctgaaaaaaaaatccacaaaatcatctatttttgcaattttacaatttatatctaaaaactataaaataattatataaagttaaaaatagtacgcaatataacttttttgctattgtaaaatttttaaattttgataaataatatatcaaatcgtagctttcgagatgaagagttcaactatatctttaaaattttcaaaaacaagtatatgtgaccataaaaacgtttacaatatatgtaaagtttcataaataggttatattgcatattatttatgaatttatatgattattttgcatttattggacgttgaaggtaaatttgaaaaaaaataggtgattttgaacgggttttttttgcacaaaattcctaaaagaaaataacatatttgttagataacttatgctccctttgtcccacaaagataaattttctagaaaaaatatttgtcccacaaagatagaagttttatattttcaatgcaaattttaaaactatttacctgttttacctttattaaataattagctaaatatttattattatttttaaagtttattaagaggttaaaattgtcattatacaatattttttaaagaatgtgaaattttttaaaaatattatcttagtaggacggagggagtagaaaattttccaaaatagaaaaaacttcataaattttttgtttctttgaaaagtccatctgttaataaaatatcaaaaataactaaggaataaagataaattatgtttgtaaagtgacaatcttaaaaacgatatttaaaacttgaagtattatttgtaaggttggccgaattttgggggttttgggttctcgattctaatttgggtgtgctgggtctttattcaatgtctttcgatgaagggttagtgtatgagagtgacccagatgatctcgagtacgaatatctggggagtgatgtcgagagtgaaaatgttggtggtgaaaacagaagttcgggggacgatgatagtgtggttaagaatgagggagacgacaagggagattacgacgattccgatgaaagagatgacagaggtggtgatagagacttacgtttcgattaattaaagaaatgagaaaacgacgtcgtctttttctcgggtcatgggtgattattcggggtaatcgcaatcgcggtacagtaaacacgaatttatggttaactccggtttaatcactggttcaattggaggcgtagtatttcacatgaatccaaaagtatatgtatgtattttgagaatttatttgtttatggtgatatttcaaaggatcaaaagtttagaggagaatgttgagaatgttgagattgttaatagtatagggtggaaaattcggccaatccattatttgtataattaaaaaagtgtgtagtttttttacaaataaaaacattaggaataatttttcagaaattcatttactttaatagagaaatgactttcctaccctttttggaaataaagatgctcagacatcgttatcttcgacttgataacttataaggtaaagataaaaactgcctagatgtggtgttgagtaggaaacgattaatcaccgtctctttgaatgttcatcggcgcttacaacttgggttctatcgtcattctcattgtcgccttcttccttccctagtcattcactcttctctaacttcgctttttttttggagagcaaaggtgatgatgaatgcagaggaagatagttttatttctcatagatacctaagattcagaatagatttatttacgagaatactcgggagaatcatcataaaacactagagcatgccactcaagaggtgactgcattgcatgtggtaaataggaaagatgacgccctttacgtaaacctggagccaccccatcacactacaaactttgaactacccaaccggaatgccaaattgatggctcatggcgtctaaccgacccctttagtgaacatgggtagattgtcatggatggagagacacctctctttataggattaagaagctcccgtccggggttatcccctcttcaagccgaattggttaccttgctttggaccatggagtgtctcatcacgtcttcgaagataaattttagctttgtcttagattgtttgagttaatatccattctacataatctaccagagtggcttacatttgtagtagaagtttaacactaaaaaacttttgaaacttcaggccgataacttaataaaatggtgactttgaccggaaaaaaagaggtaagatctaagtggcacagaaaactccatctcttatgaaatttcttcctaatttatataatcagagagtcataattcgactgtaagagatcaaatggtatcaccattcgacaacttcatatctggcaaaagaactacctttcttctgtaaacccttctacaaataatttaacataatcttgaaaaaaggcagtacttaaaagactacaagttaccaaaaaaaaaaaaacacaacagaaaaactaaacacaacttctcctccagcttttcttcatcaatcctgatttgccttgatgtatagtataactctcattgaatctgacagttccatgaactcgagagaaagaagaggcagaaattctcattggttaaacagatgagaagaaaaccaactactttcaagccaccacagtgttctctcctcttctatcaagagaagacgactctgcaacactttctcccatctctgtttcatcttcttcctctctgttcgcgttttcttcaccgctcacatcactaaagccctttgctgcatcatcatcttcaacctttgattctttatcttctttcttcacatcatagctctcagttggctcctcgccatcaaactcttcttgtaacttactctcctcaacaaacttgtctgtgtcgtctagcaatgacccttcaatcttgtgtatgtcttgagtctcaggcaattgagggatggtgtcgcaaagctccatatcatcaactttggtgacagcatcatacatatgtgttccatcgtaaaccgagtttgtatgactaagcggtaaatgcatctgaccaacctcaaccaaaggtccaaactgggattcatcttcactacctccataatcttccattggatcaataccttttcttctctttcccatccccttccttctcaccctttctttaccgcgcattcttttcccaagttcaatctgctgctgggtttctggtgtagccgttaccccaacttgatctctcaagcaatcttgcgcaaggcctataatccgtgaaatcatgttgcctctttcaaggtccaaatcatgtatttgaaaattctcagctaactccaatatatccctcacatttgaaatctgcaataacaaggaggataaagtaataaggtcatacctacatacatactgtcacaatgacctgagggtcaaaaaatttgttcttagctattaccgttctttgaaactcgcttgagagagagatgggccttcctacaatttttcgggtaattcccagataccacctcatgtagtctgcttcgtcaacaccttggacatcgtcaggtacaatgttttcccacctcatttcccattcgcttaactctgattccattttattcgacaggtcaacccctccatcaactccccgagactttcttacccacctttgcacatctgctgggatgtcttgaaacaagtcaaattgtttgcgacagcgatcaggcagatgtctctccgccttgtcaaaagatatcagcattgttttcgatctacccagcagcagagactttctcatacggtctgacatatctcctccattcatattttcatacggaagccacaccacctaattcccaaggtatatcagcaacattagatcaacagaagtatacacaaagaagagtagctgatgaatatgaaagataaacaaacttacatcagttggcttcatgacgtccaatgctttgcggtaaaagaccacatcacggtttgctgtaggaccattttgcttccccttccacttaagcacaaatgggaactgatcatggatgggctcacgattcagctttggcctgccaatgtttaagtgatagtaactccaacactacaggaaacagaagataaggaaagaagattaagtcaatgtattcaatgctgaaactagcagagacattctggataggttcggtaataatatcctcttggatcaacagtttaaagaacaggaaatgaaaaaccttaagtacctgtaatagcgtcaagcaaccacatatcgtgctttgggatttaacagaagcattcccaagtgctctatacaagaaagccaaagcagcagcaccccaagcaaatgttccagcatcatcaaaatcctcaaacagcggaagatacataacaggcaccttgtttccagtggttgtagagaagatggtactccctactaagtacaaaaggtaagcccgtgtacggcgctcaacttcttcaaaagatgcatcatcaggacattcagagaaattatctttcaaccagctaagcttaaccatcccaccactagcggaattagatgctggtgactttcctaagtacctctcacataccgcagaacaagttgtatacgttaatccaatgacaggtttaccatcaatccccaatcccagtaacaaggcaatgtcctcaagagtcacagtcatttccccaacagtgaagtgaaaagtgttggtctctctcctccatcgctcaaccaacgcagagataagagggttatcaagactaatagcagggatccgtctcaaaaacccaaaaccagctctctccaccaattctatctgctttggtttaagcttccactcacccaactttgatgtatgctcatgacacctcaacgcacctcgctcctaaaccacataaacaaaatgcaaaatacataaacaacaacactaagcaaaagcatccaattaatgtcacagcttcaacaaatcgattataactatagagaagagccataagagttaaaacctggccatcccaaacagcagatgaaacatgtttctcttgatcatataacacaatgtccttaagtggacctggattcgctaagacatccatcagaatcaacactcacctgcacaaaaccaaacttgaatcaaaaaattactccaaagcttcaaactttaccaaaaaaaacaataattttgataaaaaaaattgtgccctgaagcaaattatagattaaattccatgaaatcgaagaaaccctaataaaaaatatccaatctttcaagacaaatgtaaaagacactacgaattcgattaacagagaaaaaggttagatttttattatcattgttgggttacagagaagaacaatatagaatcagagaggcaaagacgttaaacaacgaaacgacgccggagaagggatagactaaccagaaaacagcgcggaacagaggatgaagaactttgaaagaatcaaaacgacgacggagtgagataaaaaaggagacaaagaaagagtttgaaggaagatctcaggatttgtacgaaccctcaaaacgacggcttcctcgtcgtaagggataatgcttttctcttctctcttttcttttattttgcttttttcgttataagaggcaaaaataaatatctgtgtcagcatgtaaatatgggccttaccggcccaggagcttaattgcttaactttgtaaaaatgtgtacaagttgtataaaaactaggatacattgaccttaaatcttactagaaatttgaactctacaccatcattttaaagtatttgagatatacctaacattgttataatgacatttttattcttatttagtaatcttttttcttctcaagagtattttgttaatcaacccaaggttacataaagcctactgattttgcaaacataaaagaacgaagctcaacaagatagctcaccaattttacatagaaagcaaaaagaattttagcgtttaaactagatccaaagtcacatgtcaaccttaaattactactgcaacacgtgttgatgagtcatcagaagtgtaccgatatcaaccaccgctgtcgagctctgatttcggtaaaaaaaacgtcgccgacaaacaatcgcacgaaaattctttttgatgtaaccgaaattttctgagcagagcttcaattgaaagatacagcagaaagggaattgtagtacgcatcggagtattcttcgatcctttaccccaatatacaatctcttgaaattgttcctacaaatcaagctttatactcaaatctcttcaatttgtgaaattgaaacaattcatgcaatccacaagcagtcaatcacaaaggaaacaagtcggagaaacccatcttgaatagataatcaccgactcatatccaaggcaattattgaaagataaagatataaagagatcggaaaaaaaaacgatctacgggcaagggaaaaagataagccagccaacgctactagttgaagtcatgcgtcgctggacgaaagtcggccatctctgctaacagagttagaagatgccggacaaaagcccgagtgagtcaggacagcggttcaccggaaaaatttcggtctgtaaaaacaaagaacaatcctctctctaaaaagtccaggagagagaagagagagttcttatttagttatcacaaatgagcatttaagatatacttataatgtttatattttaattaatttattcaaaaatttcaaaaatatacacatatatatttttttaaactaatttttttcacatgaattacaaacataattttactaacattttttttttattttaacttcaattatcttaaattttttaaaaacacatcgttcaaaaaagttgacaatgtaaaaaatcaagtaaccataatataagttgattgttctaatataagtcgatagagaagaaaaataagtcgacagttcaaaaattctaccatattaataaattaatataaataaaataagtctattaggataaacaagtcggtataaaaaaaaatataaaatcaacaatcaagaaaaaaagtcaacattttacaaaagtcgacatggttaaaaatctgtcaacctgaatataaatctactattttaaaataagtcgactgaacataaattaagtcgaaaaaatgaaatataagtcgttagttcaaagagtcgaccttatatataagtccatgtagaatgaggtaagtatacatcaaataaacaagtggacataaaaaattatataaatcgatgaaaaacaaaatcaagtccaacagttcaaaaaacggggaaaatgtctttaaagttctcaacttattgaaaacgttaacttaaatactcaattcacgacaaaatgaaataaatatcaaatttatgttgactttccaaataaataccaaactttcgttgaattagtcatattagacatgacgttaagtgctatagccgactttctcatcatatttggaagagttacagagcgacaaggatgagttcacaagcttttctctatctttcatctctcgtagtgctaatattaaaccagatattttggcacgaaaaatttgtacccaaccgcttcatattacatatgtaaacatcattcttcaggattggctcgtttgagccctaattaattttcggatgacaaaaaaaaagacatgacgtgacgtgggttaacaaactatgttaataaggttaatttactgttaacagatctgttaattgaaaaccacatcattccctcgaataataaaacgacaatgctttgtcgtaatcgctcaataaaaatctaattttcaaattatatgaagttttaatgttatgaattttgcttgatttggggaactaagattgaatttttggaattagttcaattgctatgattcattgtgttgttatatgttgttgtatgaaacaatgttgttttcaattaataagtacattgatagaaaattaactccattaataagatatgttgatctatttaacgtcatgtctaatatagattggtcgacgaaaaattgatattaatttcaaaaatcaacaaaaatttaatatttgtttcattttgttcgaaagttcaagatttaaattaatatttctagtaaattcaggattttcatgatattcttgccattagaaaaactaactactggatattaaaaatcaacgagagaaagcataaatgcctaagtggactgttttaaaatatctcaagggaaaaaaaaattagtcaacagtaacaataaattacagtagtcgatagttcaaaacattgacttgagatacacaagtcatttgtcaacttgatatacacaagttctaataattccgacacaaggaaataaagctagaggagacagaacagagatagtatgcgcattaccaaacccataactctatatagagacctttcttacttccattctctactaaaatcttgtatccatggtgaaatctcttcttctccaatcactatcttccgtgacttactccgttcctctcttacaccaaatcatttcactatgtctatctttctccaagccactactacctctttcaattccttcaagttacaagtcgaacaagtccaaacccatctcacaaaatcaggtcttgatcggttcgtatacgtgaaaacatctcttcttaatctctacttgaagaagggttgcgtaacgagtgcacaaatgttgttcgatgaaatgcctgagagagatacagttgtttggaatgcattgatttgtgggtattcacgaaatggttatgagtgtgatgcgtggaagctttttatcgtaatgcttcagcaagggttttctccatctgctactacacttgtgaatttgttacctttttgtggacaatgtggttttgtatctcaagggagatctgttcatggtgttgctgcaaagtctggccttgagttggattctcaggtgaagaatgcgttgatttcgttttactcaaagtgtgcagagttgggttcagcagaagtcttgtttagagaaatgaaagataaaagcacagtttcttggaatacaatgattggtgcctatagccagagtggtttacaggaagaagccatcactgttttcaagaatatgtttgagaagaatgtggaaattagtccagtcactatcatcaatcttctttctgctcatgttagtcacgagccactacattgtcttgttgttaaatgtggaatggtgaatgatatatctgtggttacttctttggtctgtgcatattcaaggtgtgggtgtttggtttcagcagagcgtctttatgcgtctgctaaacaagatagtattgtcggcttaacttcgattgtttcatgctatgcggagaaaggagatatggatatagcagttgtgtatttttctaaaacgcgtcagttgtgtatgaaaattgatgctgtagctttagttggaattctccatggatgtaaaaagtcttcccatattgacataggaatgtcgttacatggttatgcgatcaaaagcggattgtgcacaaaaacactggttgtgaatggactgataactatgtactctaagtttgatgatgtagagactgtcctgtttttgtttgagcaactgcaggagactcctttaattagctggaactcagtgatatccgggtgtgtacagtctggaagggcaagtacagcttttgaggtgttccatcagatgatgttaactggtggacttttgccggatgccattacgatagccagtttgcttgctggctgttcccagctttgttgcttgaatttggggaaggagcttcatggctatactcttaggaacaattttgaaaatgagaactttgtttgcactgctctgatagatatgtatgccaaatgtggaaacgaagtacaagcggaaagtgtgttcaagagtataaaagctccgtgtacagcaacatggaactcaatgatatcaggatacagcttatcggggttacaacatcgagctctttcttgttacttggaaatgcgagagaaggggttgaaacctgacgagatcacctttttgggggttctgtctgcatgtaaccatggaggctttgtcgatgaaggaaaaatatgtttcagagcaatgatcaaagagtttggaatatctccaactttacagcattatgcacttatggttggcttgttgggaagagcatgtttatttactgaggcattgtatttaatttggaagatggatataaagccggattctgcagtatggggtgctctacttagcgcgtgcattattcacagagagttggaggttggggaatatgtagctaggaaaatgtttatgctggattacaagaatggagggctgtatgtattgatgtcaaacctatatgcaacagaagcaatgtgggacgacgtagttagagtcaggaatatgatgaaagataatggatacgatggttatttgggagttagccaaatataataatttgaatctgtgaaacaacagaacaggttacttatacgttctgttaatacctcagtatttttacctgattgctttgcgatggtgaggagagttaactggagtgttcgaacataatatttgttgttcaagcttcattgatgaaggtttcttagaatccttgataaagccttgaagaatttattatagatcatcgaccatatctctatccggctgaaaacgagtatagaaactagttgtgattgatttttagatgacttcttgtgggagctgcaaatacatagaacatgcaggactacttagagctattcactggaattggtgaccaaggcgctccagttagtgtcctactgtccttgagcataatgtgagttttcttactgtcctcttgagttcttatcttcgaagcttgaattgtatgtattctaaaagacctcaagcattgacaaaagcaagtatatgttagccctttaaagatattagaatgatttttcatgttctagttttgttttcctggctagaaaaaacattgttgcaactggtgaagaactctctcagcatatgcagactcaaaaatgttgtatttgcatatctgttgggttcaacattcgaatttgatggctaggttagttacataggtcattctcagaatgttgcattcatatttagttttatggttgccatttatttgacatcagtctctctattgtgacactaatgggcttggagtttcttgagttgtcatgaattttctttatcagtcaataaggtagtagtaggtaatactgatattaagcacaatcttcatgactcagccgcttagtacatgcttttgagtgtttattctgaatccaaatgatctttctcaagttcaaacaatatttatgccgatttcctgacgtcatttgtttagatcattgtcttgatgtttttgttgtagttatcttaaaatgtgttcatgtaaatctttcgaattgccatttcaaaggggatggttatctgtattaattggctgatatctccttcgtctgagctctacatatgatgcaaatgatggatccacaactttaggtaagtcaactttgaaccaacaagttacattgtacatgagggtactaagcaaagatatataaatgatattgtgtctctttttctgtcttataattaggacccaagacctaactatgactcccactgcatctatcgacaccggtcaaaccatctctcttcatcttctcctctttagcctttcgacaaaacacaacccacgagttaacttccatggccacgcagacaccaaccagcgtcgacagacatagacagtaaccgagctttgcgtacgaccttccttcccttaaaacctcaaacccttggaacacattcaccacgcccatcaccacacacgcgtacccgacaaaatgatggtaagacttccagtacctccggaacttattggtcgtctttggtctgaacagcaaagccagtgtttgcagcgccgctgctgtgaaagtagctatcccgaggctccgatgtaacccataggtcactccaggggaattatggccgagcacgattccaatggagaagccaatggttcctaggaggaaaccggttagctgtattgctgcgtggatgtagaaccaagtgggtcctattgattgcatttggcggaggtatctagctgttactgctcccgccgggaggagaaaaccccacgatatcgcgttgactactccgtgagtcacttttaaagctcgggaaccgctgttttgattaacagttgcaaatcctatagaaagaaacagtgtaagatcaaaccttgctgaagtgagaaagaatttggtggtagtatgagagatcaaaggttgagaaagaatttggatacctgaagtgacatcaaaggtggagaaggaggagagatcggtggaagtagtaggatgaatggtgggagagtaaccttggacataaagacctctgttccaaacatggtggatcttagtattgttcgaggagagcttaacagaggcataaatctgaacggaagcaccattacggatagtggccattttaccaccgtagagagaagcagaggaggaagagagacggacaaggtcaagcggacgggaaagcagaggacctttctgaagcttgactgaagagtcaagaacgtaaggaaggaggatgagctgaccagaattcggatctggaaaggcgatgaggacacgagaaccagtcatctgcgccggggaatccgggttaatcccccatccaacccacccggaaggtgagatgaaagttccaaagaaacaaaggtcgagagtagcgttgtgtggatggtatgtccacgcgattgacgcttgttgtgttggaagagagatacatttctcgaagcttttcgtcgccgtcgtggtggtgcagtgaccagctagtgattcaggaagctttgttgctagaagaagaagcaagaatgatagaatcaaagtcgccattgtttgatcatctctgttttttttgttaatagagtcgagactttttatatgtgtagtgaaacttaagaaatatgattgtgattgtaaaagttgatattatgatttttcattgaagtctttgctttgaagctaagtgaaactcaaacactctccacaacacagttggttggttgtgtaatatttggacatctttttaattatgataaaatatgacgtggataaaatatgccagctcggataacagtaaacgacgtcgtttcttatttctgattgattctctgtagagaagaggaagagaagaagaatggtgacaagaatggcgacgaaggtgagtttggaagggaagagagtggttttggtaccgtacatggcggaacatgtaccaaagtaccatcaatggatgcaagattcggctcttcttgaagctacgggatctgagccgttgagtcttgagcaagagtatgagatgcagctttcttggactcaagatcccaatagtatgaaaaaactctaaaccctatttagatatatatcttaaatcttccatcttctttatcttagatttgatcagtttcagttttactcaattagggtttagggttttcttttaaactaccctagaatctcaatgttgattgtttttgtttgatattttagtctttttctgtgaatttgatatcacctaagctccaagttcttggatatttagctatatagtgtcttatgaggttcattgagttcgtctcttaaccaataaacaatgattagagtagattcatgaccttttatatttgattaggtctatcttctttttcaaatgtagtattttctaatgcccatgtttttggtttcagagcggactttcattgtcttggacaaggatttcgttaagggagacctggctcatggccaacctcatgtagaaggtttgtttcctgagtataaaggagattactttagcatgcatcagtatggaatcttctatctagctgctgtgacaatgcagtactctctgcctttagttaataatgtagtggaattgttattagaacaaagtgtgtatagtggccggaaaatgagaacatatctacaagactgcttctttgttagtggtttagatcattggtgactaggttggctttaagagttcttccttatcttatttggttaaaaagaagtccatttagtttagcttgaatgctctgtagtgtttcttctgtgtatgttattttcacatttagtcattgtcaatatgtaactgaagcttttgtgcagcaatgacaggtgatgtgaacatttacatgaatgatgtggatgatccaaaggttgcagaagttgaaataatgatagctgagcccagaaggtaactttagtcttcccaattcgagtcctatacaacgcgaatacactttagctgatgttacttctggcacatgattcttatttttttgttacaaccatttggtagagtagccgtggtaaaggactaggaaaggaatctgtgttgataatgatggcttatggtgtcaagaacttggagattcacaagtttacagccaaaattggggaatcaaacacagcttccctcagcttattccgcaaactagtacaacaactcaatctcttgtctcaaatgtatgtgctccattgcctgtgtttacaaaggaaaatggctaaacacactttgttgtttgttaaaagggtttcgaggagtcttcttacagcggtatcttcaaagaggtaaaaagtagtttactacttcatacactccaacaaaggatgttacttttggcatatactagattgagtttctttaatctgacaggttacactcgagtatccggtgactaatctccgtcgagaagagctcttgaagttattggatgaagtcattaggcacactcattcatcgaacaacccatcagactcactgctatcaggagaagctactgcataaagcattttcttcagtgtttattgttatttttctcttcaacttgggaaagaatttgaaatcattgtagcatgtatgagtttataaattatgattactaatatacatggtccattgtttcaattcaaagttgagtcctactatttgttgagcctaggcctgggaaaaatacccgaatccaaaaaactgaaccgaacccggcccgacccgaacccaaacccaaaattttaaaatatccgaagggattctaaacttcaaaactcgaaaaccccaacccaaacccatccaaacctgaacccaatcaaatacctaacatatctgaaatatataaatataaaaacaatttattagtaataatcatatttacaacaactcaagtgcttaaaatatttggattttaagttttttttttttttttttttgtcatccgattataattagagctcaaacgagccaaaactgaggaatgttgtttacataagtgatatgaagcagttcagtgcgaacttttcgcgccaagctatccgcttttacatttgcatttacatttacatttgtattttaacttattttgtatatttttgaatactttacctacttttagctatattaggatataaatactcaagtttttcaaaaaaattgtgtattttcaagtaatttgaatatatttttatacaaaattttgagttttggatattccgggtaaacctaaattcgaacccgaaccaaacccaaaatcttaaaataccgaatcttagatttccaaatccaaaataaccaaacccaaaaaaaaccaaaaaaaactaatccaaacccgatccgatccaaatccgaaccgaacgtccaggcctacttgagcctatacagggataaatataattagcgaccattctatttttcctatgatacacttccaaactgaacaaaacgcaatttttatcattattgtaaacaaaacgcaaacgcaaacgcaaacgcaaacgtgaataaaacttgaatccactcataggagaaacttccaccactgattcttgcataatccgaaaaatctctgcgaatactcgcagtaatggcctcttctcattctcttctcttttcttcttccttcctctctaaaccctcttctttcacttcttctctgagacggtttgtttaccttcccactcgccaattttggccaaggcagcgacatggtttctctaccgtcttcgccgtcgccaccgagccagctatctccagcagcggtcctaagaaagcagagccatcgacggtcgtgcttcctagtaatgaatcatctgataagcttctcaaaattcgacacacggtacacttcttttggctctgtttttgttttgtgattttaagagaattatgaaaaatttattcaagttgttaactttaatgctgttagtgaagttgggttctgcaaaagtttgaattttgatttcaatctaataagaaatttttggaattttagtatgtggttttgggataaaggttgatgttttatgcagagctctgtttctgtttatgtgggaatttaggagagttctgtaattttatgcttttagtgaagtatgtttttgctaaagtttgaattttgattcaatttcatgagaaagttttgagattttggtataaatgttgttgttgagctgaatagtgtaattgatgtggattcagtgtgcgcatgtaatggcaatggcagttcagaaactcttcccggatgcaaaagtgacgataggtccttggattgataatggtttctactatgattttgatatggagcctttaacagataaagaccttaagaggatcaagaaagagatggtgagtttctgataaagtctttgagggaagaatttaaaagagtattcatggttttctttgtactttatctggtaggatcgtatcattagtcggaatttaccacttttaagagaagaagtatctagagaagaagcgaagaaaaggatcatggcgataaatgagccttataagatggagattttggatggtattaaggaagaacccatcaccgtttatcatatcggtacgctgtagcctcctgcttgcttttcagttctgtaatttgttcgtattaagtttggtaatagcttgtctccatcttatgccagttcgaatgcccatctaggtaatgaatggtgggatctttgtgcgggtcctcatgtcgagaccacagggaagataaacaagaaagcagttgaactagaatctgttgctggtgcatactggagaggagatgaaaagaggcaaatgcttcagaggatatacggaacagcttgggagagcgaagagcaactgaaagcatatcttcattttaaagaagaagctaaacgcagggatcatagacgcatcggccaagaccttgatctgttttctatccaggtatggtatagcctcttttttcagttcggaatgatattttactttcgggagatcgttgcataagctgttcaactgcaggatgaagctggaggagggttagtgttttggcatccgaaaggtgcaattgttagaaacataattgaagaatcgtggaagaaaatgcatgttgaacatggttatgatttgatctatactcctcatgttgccaaagctgacctgtggaagatcagtggtcacttggacttctacagagagaatatgtatgatcaaatggagatcgaggatgagctttatcaactccgaccaatgaattgcccttaccacatcttgctttaccaaagaaagcgtcaatcatatcgagatttgcccataagagttgcagagctcggtacagtttacagatatgagttgtctggtagcttgcacggtctcttccgtgtcagagggttcacacaggttaacttagacgtctttaatctaaacgctaaccctgttcttatgaagttctaggattaacttagttgacatttttacttccaggacgatgcacacatattttgtttagaggatcagatcaaagatgagatcagaggtgttctagatctcacagaagagatattgtcgaggtttggattcaacaagtatgaggttaacttatcaactagacctgaaaaatcagttggaggtgatgatatatgggagaaggcgacctgtgcccttagagatgctttagatgataagggatggagctatgaggttgacgaaggaggtggcgccttttacggcccaaagatcgaccttaagattgaagatgcattgggtagaaaatggcagtgctcaactattcaggtaagaaagcttcatatactcttacaaatacctgatgctacttctctattaacgggttctggttggcacgcaggtcgacttcaatcttcctcagagatttgacattacctatgtagacacaaactcagataagaaacgtcctataatgatccacagagcggttttaggatcattagaaagatttttcggtgttctcatagaacactacgcaggggatttcccgttatggctctctcctgttcaagtccgggtcttacctgtcacagacaatcaggtttaacttgtgctgtctctcgagtcttctgtttaaattctttttgaaatccatgtaactgacttaatgaggggatatgcagttggagttttgtaaggaagtgagtaagaaactgagagcttgtggagtgagggctgagttgtgccatggggagagactgcctaagctcataaggaacgcagagacgcagaagatcccgttaatggcggttgttggacccaaagaagtcgagaccggaactgttaccgttagatcgaggtttggaggagagcttggaaccattcctgttgatgacctcatcaacaaaatcaacattgcagttgaaaccagaactgctctgtaactttcatgtaagtgtagaaggaccacacagatctctgttaagcatttacattatttatctttcgttattcacattttttattcaactttctattagatcatttccaaatcacatgaccatcaaaacagttagtaatattgaataacactaacatttactcgaaattgaaactgaattgaacaagagttttaaaaaatgtctatgatatagataaatgagtaatacctaataagcaactccgagcacaaaccactgagtttcatttacggaacgatattttttcgtaggccatttgatcttacttgtggcaatattgaagacaccgcaattcgaaacacgacgatcatgatcttgatgatctggccagacgtctttatcgacgaaatagattgaatcactcttgattccatcaccaagatctttaagagcagtaggtattgtaacaccttgaccaaaaaccaacatctcatctccaagagaataaactctttcccacttgaaactctcaagattcatcttaaagatgtaaaacaaaagtctctctgcttcgtaaaacacttgtttaaggctcaagatgatcaaaacctcacctgatgatttctgaatcgctattttcctcttccaaacgtattcccacggttcctcaaccgcgttaaacagatatttccaatacgggttttcggttttcttttccataggataagctccagagaaatcaaaaatcctgatatgatgattagctgtgtacagataaagcttattgttctcacatgccatatcaaacacaaccaaacttttcccattatgattcagattacaccaagaccaatatcctgacttgtagaagaacaagtaatgctgtatgaatgtccaagcaacgacataatctcctgttgtctcgtttatccatagaacagctaccgagtttttccattcaacagagtcaaagtcatatgacacgttaccattacgagaaggcccgaagaagcatccagaatcattggaccattcattttgaggtttaaagaatacttgtcctccacgtattagtgacattgatggaagattgatcgttgtccgcgtcaaaaggttcaaaatatagaatttgagacgacgatcgaccatcaggagacagtttccggagctagccatacaatagattgtttttgagagtccggagaggtttcttcttgtgatttttcctacggtgggagaatcaccttggtgtatgaatcgccatggacatggaggcttgttcgcgcatgttttccaaactgaatactaattcgagcaaacgcgcggtgagaatcaatagggctctttaaggtttcgaaaatcttgcgtaaaacatcggaacaaaacttggaccaatcgcaatttctagacacgtttggtctcttcttcttgtacttgttgttcttcttcttcttcttcttgctcatcaagccgttccccatatctccgactgctttaccgatcacactagggtttttttggttctgtagaaaagcatgagagataacgctagggttttctatttagaaaagcgagagagataacgctagggttttttattttccattttttgttttagttgatatggtttatctatgggccataacgaaacatattaagtgaagttatcgagtcattaattttatattactttatggccataacaacaaaacatttgtatacaaatatactcttaccgtacatacaacatggaccattgcaccaatgggcaacatcgatcaatacattttaaaaaccctatagtttaaaaataattaccggaattgacattgaaaaaaaactatttaaaaaaactgacattaaatgttgcattagcttacaatttctggaggaggaataatgttttggcatccaaagggttaaattattatttataaaaaaaaaaagcttaattgaaacgatgtacatcaacaatcagaacatggttacgagagctagtggagtgagggctgactggctgagttgtgttggaccaaaattttacttaagctaatgggcttaattaaattaaagaaatgggtttaagagatggtctagctcacgttggagctttggtggttgtcgggtcgggtcttgaaaagaggaaacaagtcgctctgtactccacgttgctaaagaacaggtcttcttcgcttcctcaactccttaaaaataggagtcgttgaagtatcaagtcacccactacctcctatatttttgtttgacatggttttgattttgcgaagaaacaaattaaaacctaagtatatcaaacctatagaagaaggttacagttcaagtttttgtggacactagcagagcaccacttgaacgttcacacatattttgaaagtaaaacatctccaacaacctctctatgtcttaaactcgagagtatcgtagaaactatgtttgttagaactgtgttttcgagtgttgcaaaaccagtttatagaggttgtatcctgggatccttaaataaccagaactgctctataactttcacgtaagagtagaaagaccacatagatcataattttttgtaatgaattttctattaaattctttcgaatgagcactaacatcaaaaccatggtaacatttatacatatatagaattcaaaaatcaattgattgaataacactagaattatagggaaacttgaattcattaaaaacaaaatataagaatactcctacactccatagcctcctctctaataagcaactccccaaacaaaccactgagttttattaacggaaaaatagatcttcttaggccattcgatcttacttgtggcaatatcgaagacaccgcaattcgatacatgatctttataatctggccaatctttatgatctggccaaacatcttcgtcgtcgacgaaatagattgaatcactcttgattccgtgaccaagatctttaagagcgagaggtactgtaaccccacgaccaaaaatcaacatctcatctccaatagagtaaactctttcccacttgtaactctcaagattcatcttaaagatgtaaaacaaaagtttctcttcatttttcactatttcctttaagctcaagactataagtacttctcctgatctctgaatcgctattttcctcccccaaacggattccgaaggctccccaacgaagttattctcctgaatcgctattctcctgacctctcgtcatggcattctaggcttggtcatccatctttaccaattcttaattctgttgtctctcaattttcgttaccactttcaaattcccagcaaaaacaatggtcgtgttccgattgtcttatcaataaaagtcacaaattacctccactcaacctcttgaatatctttataccgatgtgtggtcttctcccattatgtcaatggattcctacaagtattatctggtaattgtcgatcactttactagatatacatggttatatccactgaagcaaaaatcggaagtcaaagaagtgtttgttgctttcaaggcattagtggaaaaccggtttcagtgtagaatccgcaccctatattctgataatggtggtgaatttgtggccatgcgatcgtttttgacaacacacggcatctctcatcttacaacaccaccacacactcccgaacacaacgggatatcggagagaaagcatcgccatattgttgagactggccttactcttctcagtcatgcctctgttccgaaatcatattggccttgatagagatcgccccacacatgtctgccgcttgaacaaagctctctatggtctaaaacaggcgcctcgggcatggtatcaagaactccgaaattatctccttgctgctggctttacgaactccttggctgacacatcgttattcatttacaagcgggcaaattcatatctttatgtcttggtgtatgtcgatgacataatcattaccggagatgcttcgcttgtcaaaaactttaatgtttctcttgcagatcgattctccttaaaggatcttggtgcattgagctatttcttgggtattgaggcaacacgcactaagaaaggcctacacttgatgcaaaggaaatatataacagatcttttggctaagacgcacatgctagatgcaaaaccaatctctacgccaatggctacaacaccgaagctttcactacactctggtacgattctcgacgatgccaaagaataccgcatgattattgggagtcttcaatatttgtctttcactcgcccagacattgctttcgtggtgaatcgtctctcccagttcatgcataaaccaaccgatgaacattggcaggccgcaaaacgagttttgcgatatcttgcgggaacgaaatcacatggtattttccttcgatctgatgctccactcacagttcattcgttttcagatgcggattgggcaggagatctcggagacggcctctcgaccaatgcatatattgtttactttggtggcagtcccatttcttggtcatcaaagaaacaacgaagattctcgcggtcatctacggaggccgaataccgtgcagtagccaacactgcctccgaacttcagtggatatgttctctcctctcagaaatggggatctccttacctgtggcaccagttgtttactgtgacaacatgggtgctacttatctttgcgccaatccggtgttccattcaaaaatgaaacatgtagctcttgattatcactttgttagaggtaacattcagactggagctcttcgcgtttctcatctctcaacaaaagatcaattagccgatgcactcaccaaaccgcttcatcggccacgattccaagagctcaattacaagattggagtcaaggaactgcctccatcttgagggggtgtgtaaaggagaagtgtagattaaggacataagtgtaattagttatgcattaagccctaatgtggaacctatatatattgtaaatcattctattaatgaattcattctgctcacaattataaacggatgattcgaatacgggttttcttcctctataggggaaccttcagagaaataaaaactcttgatgtaataatcacttgtgaacagataaagcttactcttctcacaagccatatccaaaacatccatattttttccattgagattcatattaaaccagaaaccatttcctttcttgtgtgagaacaagtacttttgtttgaatgtccaagcaacaacataatctcttgttgtctcgtttatccacaaaacagctaacgagtttttccaataatctgtctcatcatcatacgacacataatccttaccagaaggcccgaccatatatccatactcttgagtttttgtttcctccttggaagcttactttatcgccacggatcttcaactccattgatgtaagattgatcttttccttcgtaaacaagttaaaaatatagaatttgagacgacgatcaaccatcaaaccccaatatccagagctagccatacaatagcttgtctttgagagtccggcgacttttgttttcctttgtttggtcttagaatcaccataatgtatgatccacaatggacatcgaggccttttcgagcatgttttccaaacggaataccaatctgagcaaacggtttttgctcagtgagaatcaacagggctcttcaagattttattaatatcttgcgtaaaagatcggggtaaagcttggaccaatcactatttctagatatgtccatggtttcggctacctcaccgatcgcactagggttttcaattatataagcatgaaataagaccaaagggttttggttttcatttattataccaagtaataccttcgtctaagttacgtttggaacataacactatgcattttttagcaaattgttaaaagatagcggccaataaaagaaagtaaaaatataaaccataacaaagtattgaattaatgatttaaaaagtaatttaaaatctaactttcttgagaacattataagcattagattctttaatgactttaaaggactttagaggatgtctttaatttaatacacacaaaacaaaatctcttggttttagtcttttagatgagatttagaaggactttactacaaatcataacaataataataaaatgattattttaaaaatccaaataagatcataagagatcaccaacgacggaaataaactaatgcatgacaagttagttacactatttaatgtcatgccaaaacgacaaggtaaagttctaagaccatctccaatggtgagagccttctcatgggctctctaccattctttaatattaactagatgaacattcatgctacgcatgggtttttgtttttaaagttgtcaaaaaaattatgattatagttttttttgttgattttgatctttattttatgtttgtgttattatgtaattaataaattcatatctattttatataattataagtttttatgattaaattcatctataactcgaaatatcacttttactactatatggatatttatatatctattatcttaatttttcactatcatgaacacataaaacaataatatatgatatattgatccaatgtatgtcgttatgttacttatgtcgtttgaaacttgtctaacttaattgtaacaaacaattctttatttcatatattccttcgtcatctagtacaccaaccacatcctaatatgatagtaatttaagtcaacactttagatctcatcccttaaatatagtcatatagagtctcatttattttatttttttttggtatttttaacgtctcaaaggaccattacgtgaaaaaattgtatgtcaatgttaccaagttattagaacgcacaaaaatgaaaagaaagaagatcatatgataaatcatatttacaaaacgtaataattagaaaatatccaagtaagattactaaattattatgagattaggtagcaagtatttaaacaacaacaaaagtaaatctacaacacaggtaaattattagccattatggattaatgactattaataaacaaaattcaataaaataagttgagtataataaaaatagtgtttgatgcatatttatgattttttatctattaatattttagaaaaattatttaagagtgagattaatggagggtttaacacaacaaaaacttttgatttttcctcaaatagttttgttaatctttttatttcattaatgtagaatgacacatgtcattttcttgtgtgatgatgtgttactcatatggagagacttcgtcaactttcatatatatgattggaaaaatttataaaaagagagcttgtatgtatttatttttgaaacaaaaatcattatccaacggtagtatacaaattgttttccacaatctctaaatctcaaaaaaaaaaatcactaccttgctaaagaaacaatgttaactagttttttttctcttaagaagtataaaagtcgaaaagaacatatatccaagaacacaaagaacaagtcgaaaagtcaacacaccttcctcttaagaagtgcagaagcacaaatccaagagactcttgatcagttcatcgactttgctcagtgaaagagaaaccaaaatatatgagcaaagacggtttacttcacataaggagataaaaaaattggcagtattcactagttcaggaacatataagattcttaatgcagtaccaataaatatcacaatcaattcaggaacatataaaacttctcttgcaacaaaaaaataacaaccacctcatattcaacactagaccagacacactctgtttttcaaatctcaacgcatcaatcaactctaaataatttgtataaaccgttggcgaagttttgttgaaagatgaaagataacatataatacttgtgaaatcatgaaacttttgtgtcaaagctgaaaataaataaaagagcacgaagatggttcttctatatatatctacattaactcttactaccacacagaggagaggcgaaagtaagatagcaaagaggagcttaagaagaaaaacaagcaatgaagctttagatcattgcaaccttacacaaatttctaatcatcgttgtaatccttctcttattctatatccatcatatgttgttcttatttctgttaatgatcacccatcttatcagtttttttgttctctattgttcaatgaaatcagaacctacaacttttatgcatccctatgacaaatccggtgccgttttaacgtctaggtgataatcaataaatggtccatcacctctctaaagattggaagggtcaagtaaatatatccttaaactttctattaaataattttcgaatgagattaccatcaaaaccatataactaatagaattcaaaatatcaataaactgaaaaacattagaatatagaagaataaatagagttcaaaaatcattgaataacactagaaattttaataaaattatatcagcttcctacattcaataaagcctaataagcaactcccccaacaaaccactgattttgattaatgaaacaatagattttcttaggccattcgatcttacttgtggcaatatcgaagaaaccgcaatttgaaacacgatgctcatgttcttgatgatctggccaaacatcttcgccgacgaaatagattgaattactctttatcccatcatcaagatcttcaagagcaagagctgtaaccccacgaccaaaaatcaacatctcatctccaatacaataaactctttcccacttgcgactctcaagattcatcttaaagatgtaaaacaaaagtttctcttcattttgcactttttttttcaagctcaagactatcagtacctctcctgatctccgaatcactatcttcctcttccaaacgtattccgacggatcctcaacgaagttaaacggatacaggttttgttctcctgttaaaaaatctccatagaaattgaaaatcttgatgtgatgatccattgtcaacaaataaagcttattgttctcacaagccatatcaaacaaaaccaaacttttcccattatgattcagattacaccaagaataatctccttttatgtatgagaacaagtattgtcgcataaaagtccaagcaactgcataatctcctgttgtctcgtctacccacagaacagctaatgattttttccattcaacggcttcatagtcatacggcactatatcatccttacgagaaggcccgaccaagtatccaaaattgtaattgttgcttttagatttgaagcttacttgcccgccacgtatttttgactccatcgatggaagatcgatcctttccttcgtcaacaagttataaatatagaatttgagacaacgatcaaccatcaggagccagtttccggagctagccatacaatagctgttgtaggagaatcccatgagttttctgttgccgtctcctacggtgggagaatcgccttggtgaattatcctcagtggacatagaggcctcttcacgcatgttttccaaacggaataccaattcgagcaaacgatttttgcgcggtgagaatcaacagggctccttaaggtttcgtatatcttccgcaaaacatcgggacaaagcttggaccaatcactatttctagacactttttgtctcttattctttctcatcaagccgttacacgtctccatgtcttcagactactttaccaatcatgcgaggggttttctgttctttatatatactagggttttgtatcaaatacactagggtttttgcgttttagttttcctcttttttttttttgtaaatgatatgtttttattttactatatattatgatcgtagcatccaatatacaaaagctcttgatggaaattaccgaggcatttattttactatatataacaaattaaaatatcaaatatatatacaaaagctcttggtcgtttttttttcttcttttttggtacaacattcagaagctacaaactcaaatacggagttggcgtatacatggaccaaggatccaatagaaacatgtatagtattaattgagaaatacaatgtgaatagcaataattatttttaaataaattactgaaattgacagtgaaaaaaaaaagaaactactgaaacagcaaattgaataccctcatcaaagggtgaaattgttagaaacataattgaagaatcgtggaagagatcacatggttatgatttgatctttaatacaacttggtgttaatgattttgattttcaatatagaaaagattattgtcgcttattgaaccacaattaacaaattacgttactaattgtattttacatatactctaaaatcatcaaatagaagatgtagttagttaaaattgtcaaatagaagatgtagttagttactaaattctaatctggacaaaaataaagatgtggttcatacgtgtgagaagagacactaccattcttttattacatttcgttgtagtgaggctttttctgttcagtcttaaaatacaaattaaactgtccagtgtccactacactaatcacttcatgctacggcccgctaattaatgtttaaatatgtattgatcggatcagaaagaatatttgtatgatcaaaaaaaaatctgttctcttcctcacagcttttctctcagatctgtttgttcgggtttatttttgctctcttgcttagttctgtttttcactcaactacaattctttcttaagtttctatggttagatgaacttagactgttattgtttttggaaaaatccgtagatctatccgtctcaatactttgataaactaaaatctgtttctttttcttataaaattgcagattttgtatcacacatgggatctaaacctagctcgctggctgatgaagtagccattattgttgagcaagtagacaaggttatggggatggttttttggtgccccctctactgggaatctatagaactccttgcaaaagatgaggtttcacgagccatattttatggactaacagaaggatgtaagcttgattatcttaaatacaagacaaaagcttccatggtcccagaaatgacacggttttatagttaaaagcttaaaacatctatgtttttatgtttttggatttgtttttgtgaaagatgttgtgcttgagtttgatattgtcgaatatgtttcatgttcattgtttatatacgagtgcttgtctacttgaatatgatgtgttgtatggattataaacttggatttgatttggtttgaatctgatctctatgacgtagcggaagcttctaggatagaatacataagtaatatcgagtatcaatggatctcaagcaggaaaatcgtagctcggaattctaatgttattggagttcaatggattccaataaacaaagacttcaaagacttcgtttgagaatactcttctcactgcttatcgaaagctctttcattttattaatcaaatcaacaactaaatacaataggaggccaaaaaaggctatatataataaaagcataaaatcctaaaatccatagaatattgtaaaataataataatactgaattaaaagataaaaataatagatatttggaaatacatcaggtctcgtctgccaagaatttttttttccttcaatatatcttgtatcttcgtcctcgaatcttgtatcttcgctgcatcgctctacctctaacattttcatacttcacataccgaaatgacaaatcatggtatacaataatctcactaaccatatcaaaatctattttgtgatcctattgcctttttcactttgctctagaggtctctttggacaacactataaatggtgctttaatgcaggtgttcctattattaattttctccaaacctttttggcaagaagggcttgtttgaagcaatggagatcacgaaacctgattccacactattccttaggcaacaagcttaaggattctaattcaaaaatacttttagttcatcaatataattttgtgaagaacatacacttaaaaaaataagtggatcaaaacttagatattcgctttatgtcttgaacaaaataaatatttcatactttgaccagattcagaacaagaaagatatgttcggtttttatcaaaaatatgttggaaaaaatgatcaaaaactaaaaatctatcacaaaaaatttcttactgattttcgagaatctaaaattgagggacaaaatcctttaaaaacctatcggatagagtcatttctgactgatttgttgtcaaaaattggttttttctttcggtaaaaacttcttgaatgaaagacaacgttgtaattttctttaacatgattaaattcgccattagccaccccgaaatgtgaggttacatatcttataactgaaaattgcctagattgactcaaaactaggcaataataactaaaatgactctcattaatgatggataaatatactaacacaaattttgtgtaaaaagaccaattgaccctagatgtcgatatttaatgttttagtgataaatatggtaatttctctaataagtctgtcattacaaggaaaaaaaattgtcaccactgtaaatattaatataacaaaaaaatatgcaaaaaaaaccataattgatttttgaagttatagaatttttttatatatttgggttgactatatatatttacggtatagtttttagttgtaaggtttagtgtttaggatgtaaaaattagttttgaatattaaattaagttttagatttgtagtatttttgaaaaataaaattcattatagtattgtttttggaaaaactcattttagtggtatttaaaagaatttctaaaaacaattgacaaaaaaaaattaaatctgtcataatatgattttgaaaataaaaaaactgttacaatagttagtattattctattaaaaaaatcatggaaacagaaaactataaatcggccaccataaggatttcaaattacaaatctgtcgtaacataaaatattttaaaggtcattcaggaatttattttattctttattaaacctgccatcaaatgacagatttatggtaatataaatttatctgtcacaacataaaacaactctgtcataacataaaacattatatttttagaaaacaaatctcccatcaaacgacagatattgtgtaatattacaagaatctgttataacataaaacaagtctgtcataacattaaaaaaattggttatcgttagacgtcactctagtaattagttttttgacaacaaatctgttacaatgtgccagattgttttaacaaaattataaatctgccatcacttatcgttaaaaaacatccacaaaaaaataactctgtcaaattatatgaaatttatggttgaataaattaaaaatatgtcaatcaaattaaatctgctataatttataaatctgttatcactatcttctaagaagtctgtcaaccaaaaaggtctgccataaaaaaatctgtcgcagttaaaaaagtctgtagaataagaataaatctaccataactaaacgatagacttttataaagttgctggaattttttttaaaggataattttatatttattttatttttaacacataaaaaaaatgtatttaaaaaaaaaaaaaactaatttaaccccaatattttataagatattctaataattaatctcattatttgggttaatctagtttttttcctatcttagaatccagtggtatttcatgtctaatcataatcttcacgaatataatggttttaactttaataaacaatcatgaaacgttagcaaatgaaaacatcttagttaattaatagaaatttcaacaacaaagtccaaagcatccagcacaatctagattctagactgtttgtaaattcaccaatcattttaagagaaaattaacaaacgtcaatcgcgatgatgggatatttcattgagcaaaccgcactgagaacatccaaatcctaattttattagtcagcactacaacaaatttattttgtaactaattaaattggcaatgattattaaaaaagggtcggttcatgctgtgtcgcactaaacgtggacatgagtattttccacattgttgtcgtcttcttggtactactctccgcgttagctaaactcatttttgacgaccattcaccatttggaccaagttctttgtatgttaaatagtagttaataaatcaggctatatcaattctttaatcatctacagtatatttatgcacgcttttgaattaacatataggttgtgacacaacactggtttggtattataacaaaatactagacttataaatctcggtcagtcatatcacatcaagtttattatataggccctatttttttctcacgcgctgtgtgatcagattcagcgatcaaaaaagtagttgtttaacacacaattacgttgaaagtttgtaaagagttatatggagaggagtcgctcaattctaaaacagcgacctataagaaatatacacgcgtcgccaaaaataacagcgactcaaaattttcactagtgacgtcgccgacgtccatactgaacgattatttttgtatctccgttataatttttgccttcgtcggagtcattgttgctgtcgtagcgattaataaacgaacaggccatagtattaacctcaggactagtgaaaattttgtgtcatagttctgttaaataatgtaaaatactaagccataagtaaaagtagtttatcccaactctttttcttaataatggatatatcctaatgtttgttgtgtatgatatatatttatatggtggatgagatttccctaatattatgtggtcataaatcatctaaatcataaatcatctaactcataaatcattatcaaattcaagaatctccaagttttgtatatatgacaaccactagcatatatatcagtttaaagatcaaaaagcagatgagtaagagaaaaagttaaatattcctagctaagatatgttctttaataaacacaaaccatgaaaaaagaagtgaaaagcttttgtatatctcactaaatgccctaatataaacgccatcaacacaaaagaaatatgtactactagctaaattaagtcgagctagatatataattacattaagagagcgtatctcatgccatcacaaaccatgagatggttaacctccgagacccttccataatctcccgacacccacacaccatctgccctgctaactcgtggaaccgaaaaacatgacatgatcgatagcggaaacttcattattccaccgttactcccgtttcctcccccgtgatctccattaaccgtcgttgaaggcaacgcgctttcgtccgccacccgcgggctttttcgaagattttgaaggtttcttcttaatatagacaacatcttgagcatctttagtgttttctcctttgaaacttattttgggttttggtgtttggagagagcaaatgagttttttttttgaggaggaagaaagagaggttacttagaggtatttattgggtgaaaactaaaaagtgcaagtggccaattgggaaaaaaattcctttttgtttatttgttatctagtcgtagtagtgcttgagtttgtcatggatatatttttggttctaagtttcaacaaaaaaaaagggaaatagtggagatagaaacgtgaggcttcgctttaggaactggccccatgattaacagagatggtggggtcttattttacttgggtattatttatctgaaaacaaaaaaaaattgacaagaaacaaaactgagtgggatatgtagtttaggttttgaaaggtgattttacacatagaatgatagaactaaagagtgctcgtatagcggtcccatgttcgagtggtgatgatttatctgatggtttgaattctaccatatctataatccatccgagaaatagaaatccggaatttcttttatgaattataagttaggatatagtgaaaactctataaattaataatgttgggaccttgaaattttattaatttgtaatgatattaatttatcatataccataaattaataaattagaaatatttacacaaaatataatattataatccttttatttttatttttataaaatttatgctttgtcgtttgtatattcaattatgttaaattttatttttttattttattaatttcttttcctgcaagatagtatgtccttatatctacgatgaagttgtgattgataatcttggggtctagatggtgattgagctgaatgagataaattagctgcagagaaataaaatgtatgttaaatagtaaccatttagctgaatagttaaatataaaaaaatattatttaaaataaaatctaacaatgtcgatgagaactatttcgacttgcggaccacatttgctcagcaatttgatcacggacgatcttcatataattcccatcttcatataagtagagagaaatattatctttcactcatgattgactaacaactattgtttttgaaagaagaaaatgtgtttagttcataatattttgtgtaaagataaatcttgatgggattagtatatttataggaacagattttagctgttggttttaataaaataaaaatatgaattattcaaaattgtccaaagtttgagctgatttataagaagatattatagttgttggttcgtgtatatcttatattcgacaacaaaagattacaaattattcaaagattgaactgaattagtttagtatttgaattttctagattctctaaacaaattaattaatttaaatgtaatagagatagaaatatattataaatttttatcacgttcaatttgttcttctcctaatttgaggttggacaattttcagctaaaaagtgtaaattttcagctttatggtgggccccaataaaattgggttgaaattttgttaaaagcaaatggtgaatttcttgaggaataaagttgaacccacaattcgactctttcatcttaacaaatctaggtatccatttacacccttgattatcgaaatagaatgaatgttcaaagataatgtggaacctttggaaatagtgacatgtaaaaaagtaattattaagtataaaactcttcaaaacttttggaggcagatcgagaaaacgacaccaggagttttgatgcaatatagaaaattacagataatcttcaacgagatccgtacgaaaagacaaataacactagattcatattatactagattattttaaaatgtatgcttaagaattatgataattaattactgatattattaggatcatatttttacacaaggatttcaaaaaattattatcttattattttattaattttaattttataacaaatttagtaatttatcgtgtttattaacttattatatttattaatttataaagtttctactgtatataaatttactttaatatatatattatatatcaccaaatattgtagtttcttaaaaatccttaatactgtaaatatatgttaatttcgattatatatgtatagtgtggtgctatatgagttagtctttaaatattgctctttttcaatcgattggtcggtgcaaattgaaaaagatattcattttggttttgctgatttataattttgataattcacagggaaacaaatccaaaccaaatcataccgaatcacatatggtttttaaatagtttattattattatttttataataaatccaataaacaccaaagagaaccgagcaaaccaaacaaattacatacatttaatcaaaccgataaaccgaaaaccaaataagaacctaaatcagacggctccaatttgtattattttccagtttggggtaagaaaatttcaattatgtttcattttgctcttttgttttggcttaacctttttattagttactttacttacaacaataaatttgaataatgtaagacaaaagttgtaaatatagaaaaactaaccactcttactaataaacaatactaatattcaatttatcttcaactactaattatcacatcataattgtcgggtctaaaatcttagtagataagataaatgaccatttgtttcatctatagcattagcttcttggaagtcgctccacaatttgcatttctccggtaagatgttggacaagttctgtattccaaaagattaaaaaccaaaaacacttagaaacaaataaaaaccaaagtcttcttgattaaattaaagcttgtataacactaaaccattggtataatgtcggcaatcatgaaatccaactctcaaatcagtctcccatgacttattaaactccattgccatttccatagcatcattccctttagatggtccaaccatccaacatctttgtcttggaacattcttcaaccttctttgcaaaactacacctgtaaccaaacaaataattttctttgatcagaatcttgactacatttgcatgatcaaaaaggttcgttgaaaatcagagaaaagttgtctgaatcacagattacattcgatgtctgagaatcagaacctggaatcaaatttcctgacaaaagtgagattgctgcttctatgctttcagggttacgtggctgaaaatcaaacacaagaacctaaagattccacaaaacggattaggtcaacaagtattattaactcatttatgcattttagtgaaagttatatagatagagaaacctcttgacggattggagaagaaggtttgatgaggaccatgaaatgttgtaaatttgagatattaagtgagtaagccattgacataataagttgcggcggaccggccgcggctttaagcggcaccgccgctacatagatggtgtctccactactactagtggtggttggtgatggtgtgaagagagaggccattgtcttcttctgtttcgtgtggcttgaatcgttatcttctttcttgaccataagcatttaaaaaaaaaacattatcctaaaatgtgaggtcataattagtgatttggagattatattatacacgaaattataaatctgttatgagatgggttacattagcttggatgtgaaccaatatcaattaaagaaaagcaaaatggaggaactatctcaattcacaagagtgagaatgataatctacataataataacatctctttaaatatctattgactttagaaatgttataatggttgccatttgcctttcaacacaatttggttacatgaatgtttatactcctactctcttttgatctcttttattctccatggagtaggaaatttcattgttttgtggatagttgatggttctactcccataattatgaatccaagggcgtctcgtaatggcgttgtaaccatagagataaaaaaaaaaagctttactcaaaacgggttaaggctcgttactgctagtcctgggcgtttgggtatttaggtcaaatatttcgggttcggattttttggatttagaagtttaagacccgttcgggtaatttaagattttggatcgggttcggtttgagttcaggttcagacttatttatatattcaaatatcaaaattttctgtgcaaatttattaaattacttgaaattttcaaaaattcccaaaacaacacgagtagttttgcttgaatatatctaaaaatacacaaaaataactaaaatatctgaaaaattctaatattttatatatattagtataaatataactaatatatacttatacttgagatatgtttggttacctattcgggtttttcggattttgaaatttaaacccatttgggtatttgaaaatttagggttcgggtattatgccgaggcctagttactgccgtaatcagactagtgaaacaaattctgcatattatttatccagattgaacaaatcccaagccatttattgacttatcttcagattatatcaaagagaatgaactttaaacctcttggtatcatcttaacttgcaaatgaagcaaaattaactaaagaaaagcaaaatggaggaacaatttcaattcacaacaatcgtaatgacaaacaataataatgataaaaatgtataataaaaaatgggtttcaaaaatcaaaaagacaattcaaatgatgtaatacaatctttcacattgtaacttaaaaacataactcaatctgcaaaaccatctgatcacaagaacaatgccaccaaaccggaaataaccatggagattggtgcaagtagcagcttttgtccggagttcttgtgtgaggactttggtgaagaagctccttcagaatcagcaactgaaggagaatccgaaggagcactaacgataggagcaggagctggagcaggcattggagggacatcagtaccaaagattgcttcgggtagaagcacgcggttcacttggtaaaccgcaacagggtcagtggagaaaacactgctgctgactttagtcctggtccataaagaatcaatcctaaccgtgccagaaacatcagtgaatttcaaggagtattgaccaccagcaaaggtgctcactggaccagattggctcaagttcttgaattccgaaagcgaatagtaatgaggcagagcatggaagagaacaagctgcttaagctgatcctttgtgagatttgacaaaggaggattcttctgagctttgaaagcatcatctttagggacaaagattgtgatgccttcctcagtgttgttagcttggttttggaaagtctcaatgactccagtcgagagaaggtagtcgaggaatgtgtggaacggaccagctacacttaaaagctcggtgagattcacattttccggggctggtgctggagctggtgtcggtggcagcactggagctggagggcttgcggttttagcagatgcagagcagacgataagcgcaacgacagcgataaagattgataattgcatctttgccattgtttcttgaactctcctactgcattacaagaaaccaaatcaggattcaaatatcgaatctttatcaagaaccctatctcagatccggatctgttttcaagaacgaatgatctttgagttctttaacaggatcaaagaattatatagctactagcaaactaaaactagtgtaagttagttaagtcagatcttgaacttgtttcttcaacattactggaaaaatgaaaaacaaaccgacacaacaacaacaaacataaagacagtaagaagctaaagtgttcacaagacacaagagaagaaactagatctggatcagacaaaaatagaaacttaagacaacaagtgtaaagaagatacattcatggaagtagtagttcaatggcattgttaattcaactgtaccataaagtagaagagagaggagagaggggaagagagaaaagctgacctgagctcagagcaaataatggtaaaatgtgaagtctttctttgtttctttcttagaagatgaagagaagcagaggaggaagaagagagatggtatttaaagaaagatttattattaaaaaggaaagagtttttaaagacagggtgtgttgtaatgtaacttatgcggtgtaggtgttgttgttgttgttgttgcggcaccgtctggtggtgcgcttgtgacttgactatgccgttttacaacaacaacatcataatcttgtttttatttgatcatttttgctttgtttaaccataaacactcttcttgattttgtttcttttacctatatgtatatgattagtgggggttttagtgtctttctcaatcattaattgttgttttattattttctttgtttatcatttattgttgcattattatttgtttaaatttataaatacatttttcaacaattttcaatgactttcaaatttatttttttctaatctacaagtccacataaaatttggttgttgtaatcacaatggatgcattttaaatgttactaggcagatttgtcacaagtttttctttatctttaatttctcgtagtgcaaatgttaaaaccgataatttagcacgaaaaattcgtgtctaaccgcatcacatcatatatgtaaacaacatttaagctctaattaattttggttgacaaaaaaaaaatgttagtaggcaatttctttgatttgatatatcggttaaaaatgattacggatgagatagtttcgagtgattgacagaggaaagtgtaatggttaaacgtatattatgtgagtttgaatccggatggttatcttgttaatgataatagcacaatgccacaaactactaaacaatatatcatgatctacaaaccaattaattgtaatttcaaaatatagatttttttatttaattttggtttacttattcattgaatgaaagctgtaatattttatttttgatctattagtaacattataatatcttcacaaggtgcgcatgaacatccccattctttaacttgtattgtaatataaacaattacttggagatactttaaaggaatttctacgttttatatccttaatcccggatctcaaaaaacttttatcttgatcggtaatggtcaagctatatacaagtttgaatagttgtgtatgtttcgaaacatattcgcaactcatatctccactaaaaagtttataaatatcgatccaacataaaccaaatgccaccaataatctagatctctccacttctttgcaatttttaactagttttgacatccaattgttttagagaacccaacacggtgttctatgaatttttaacccatcaaattttaaactatactcttaattttgttttttacttatttgctttatacccatttaccgtgtttttttactgctaaattttttcttatggttttaaatcaccaatcaaattctatatgtacaatcaaaacataacaaacttgtagtcgagttaaaaaaaaaaaaaaaaaacttgtagtcctgagtatttattatcaatttctaagctaagtcatgaatatttatattgagaatatatattaactctaaaattgagaataatttctcacaattcgtgaattgtaagtgaaactaaaatagatatggaagaaacttagaaagcaaatcggagtatggtgagctttcgtaatcaaccttcaactatttgtcttcttctttaattttgactcatcaccaaccttgtggtatacgattcatttagttactctttctattccttttcatagttttttttaattaaaagccaagaaattaagaaactgtgatttaatacatagtacaaaataatttaatcaataaaaaaatactacagaaatcaaaaatattaaataaatataaactgagtttgaaatttgaaagataaaaattaaacaaacaatttttttaggtaagttaatcaataaaaaaaatactacagaaatcaaaaatattaaatgactacaaatggtgtattaaaatttactcatcaaaagtaagatgaaaattaaaatactatacaagaatcatgagtcaattaactcaaaacttattaattttgaattgagaaattataaaaataattttgttctttgtaagaaatgatagaatttcaaatttaaaattgcataaaatttagaataacgtataattattgactgaaattaatcccacttatacccaaaatgatccaacccaaaaaaaatatatatcatttcattcatatctaattagttttgattaaaaaaatatttattttggcatgatatcgatattgaaacaagaaaataaattccaattattcaagataaaactgatccaaaaccaaaccaatccaacttatcactttacgcactatcactttgtttgacaatactgtacattgctgtataaataatgaacttaccatatatattttgtcttcatcaaactgaaccaccaccatatccaaatatataatcactattttgacaattagtctgctgacaatctaacaaaccataattacagaagcttaataattcgcaacgaccgactattttgtcactatttatagattattggtgatatttcaaatccatgcaaataacttaacatgcgtgtgtatatatatataaatataacagaaaataaattaggtaaacagcaacatagaagacttttctttaagtaaatgatatttgcaaaagttgctattaattagaaaatagcaaaacgtatatcgacaaaattgattgtatgaaattcgacatgctattttacttcagaaaatatatttattatttttgttgatgaatatgtcaatatttgatgaattaataaaaaaaaatagaattattaaataatacatcacatattcatagaaaattaatgtgtgatgtattatttaataattttccccataataaagctttcataatttttaataatacatcaaattcatcatgaatgtactatttaataattttcccataaaacattaagtaaatacaagtgtatagcaataaatttttttatctaaactattcatttcagatatattagatatctatttaaaaaaaatactttaccaatatataaagcatcttttttttggagaacataataaagcatcttataacaataaagtcacataaataaaatcatccaaaatgaaatttgattttgtttgcgtcagtaaaaaatgattttattttattttattaaatatcgatttttatttgtcaactcttccggaatatgatatattgatatggattaaacatctctttacgtctgaaaatttggtttttcaccgataaaaatgacaaacaatttcaagatataatatagatgtttggatataatattatgataaacgcatatttgtagaaagttttggtttgtgccaaaagtctaaacaatttatctggtagtctagtaactggtaaactgggtttataagtattagtcaaaaaacattttaaattcgagatagacaatgtgatattcttttggggagaagtcgactttaaaacattttgatgcatttttaccaaaactaatcggatgaactgataaaaaaaaattcttaaaaaacccatgaataatataaaagtattcttttgtattcatgtataataagccgacagagaaatagaattcagttaaaataaattcattagttaaaagtcaaaaactgtattcgttattatcatccacatgttaatgttggatctaaacccttccaataaccatctatttgacaatttactttccgagtgtccttccctaagatatcttttctattgttggttgtatcaaaaggtatgatcttcctttcaagccttacattcacttaagacttggttgataatgtcgggtgattccaattagactctattatatttttcatgtctaattttcagatccatgaaaaaacgtcatggtcactacttgagttatggtgatttgatcatctccatttaaaaaaaaaacaatcaatgaaactacatttctttgaaaatcaatcctcgagatactagtcttgatttgattccttgatttaacgcatttaatatgctaataagtttatacaattcatcacaaagttttcctacaaaatgcaattaacttagcattagtcttagaacactgatgatttcattgaccaataattttaatgaaggtcgattatagattcatgtcgaatttagattatacacttaaaaaagtgggtctcaaaccactacaagaaaattgccatttaccgacttcagtattagtcactctgtagtcgttaaactcctctttacgacaaataaacgactattaatattagtcgctaatcgagagtcgctaaataacgtaatcgtattttagtcgcaaaagagcgacaaagttacgactaagtttaggtaatcgcttttttagtgacattttagtcgttaaatttagcgactattagacgacaaattaacgattaacttgagggttatttagtcgttgtagttaattagtcgttaaaatttacgactatgttgtcactatatttaagactgatttgcgactaaaatatccttagtcggaaatttttgtgactgaattgttatcaataaacgactgcttggttacatttttgatgactaaatttgcgactattgttgttattagaacatctatatgattgttacaaagatggaaaccttcctgagaaaacaaaacattacaataagcataaacacaatacaagaagcatgaaaacaaatttattgtcatttcagaaaagtacaaaacccaaattacagaaacatgttcgattcactacaacttagaattttgttcagcataagtacaagcaacacaagtacacatataaaaactttgagccgtgatattgagtcttgaggaaggagttaagattcagacctatgaagcagatgaagagggagaggcagctggagagggtgagataggatatgtggttgtctccttagctgaatgagattcgaggaaattgaggaaccgaggatcatttttgcgcaaaaacttctccactaaggacaagtgctcaagcttcttcttctgctcatctgcagctcgggaattctcagcttcacgcctctgattgtaagagacctgctcttctatcttgcgttgagcttcaagtaattgttcttgcaaagccacaaaagaagttgagtcacctgcttgcttctgcttgccattgacaagagactctttgaggcttcctactccataaggaacgcctctcgaatccctctcagtggactgcatagtatgataaaagctgagattagagaatgaaaaagacaactcaaaaacactaaattgggaaacataaaacgttacctgaagaaatatggttgtacattcctcagctgtgagctctcgtgcccgcgaagtgccatctgaaacagtagaagcttcagcctcgagctcagactgcctcagctgcaaattcttctgatataactctgcaatcttctctgtctttcgatcaacatacgtcccatcaggttttgtatgtgttttgatgaaaacgtcaccaatactgacagttttgcccaattgctcttccccatgcatatacgaaacataataatctggcataaatccttgactaaacaaatgactactaacttttctacccgagacgatatgttttttattcttgcacacagcacaaggacagtggaatttacctcgacaactttgtactataggctggctattagcaaatgtcaagaactcctccactcctgcgacgtattctgctgacaaattccctgtcatttcttcgaacctcttgtacatccaatctcgattaaaaccaccgctactcggataattatagtttcccgccattataagactaataataaaactaaatatatttttaacgtttttttcttcaaaaacgtttatttttttaaaaggtattatttgtattgtgtttgtgttgtgaatgaatattgtgtacgagaaattttcattatataggcaatttttgggtgactaaaacacgactaaatagtgtagtcgtttaaaataggtacaacaacttacaaaacgaattacatgtgtttttttaatcgaaaattacgtctattttgcgactatatttaatgacacgccgttgtagtcattcaatagtcgctatttaaacgactattacgaggtgtcgtatattagtcggcagattacgtctattttgcgactatatttaatgacacgccgcagttgtcatagaatagtcgctatttaacgactattaccacgtgtcgtatattaatcacaaaatagcgactaatttacgacaacattcggcgactaattacaaagtgtcatataatagtcgccctttagcgactaccaaggcgtctcgcctctacagtagtaatttggcgactaactaacgtctatatttttgttagttgtaaattagtcgtataattgtagccaaatagtcatcaaatatagcgactatgtatgtagtcgccgggtgtattgggtatttaactgttttcttgtagtgaacatataattttgtcatgacaataccaaaaattggttttgtctaattatataatcgcaacattaatctttttgaaaaagagtctctactttctaactttaacccttttatatctatatatacatttttgcagccactttgtgaaataaattctggagttgggatttatttacagtggctgccactggcatttaataattgtttttgataattagaaagaaaatctttgaattaaatatttgacaatcttcccaaaatctctccacattaattacacgattagttagtaaaataaaacttccaaaatatttaatatcatttaattactacaaaattatcatttttgatattgtttttctacatgactataataattcgattataatcatcaaaccgcagagatatttgatagcatttaattactacaaaattaaaaaatatttagacaatgattcataaacatatcataaataaaatcagtgagttttttttacgggacggattggcgggaggggtttgacaggacgttacttaataacaatcgtaaactataaaataaaaatattttataaataaatataatttgcaaacttttatatatagtaactttaaaaaataaattgtctccgcggtatattacgggttaaaatctagttcttatatatatatatatatatgaaacaaaaagaaagagatgaaaatactttgatgtcgggatttagataatgcaagtatagactcggtataaagattcatgcattgccatgaagacataagacataaatattatcatgtctatatctcaccgtccaaggatacatgaacatactaagcttcttgttatatagataatgttgtttttggccggacaggctaagactatttgacagtgaaagttgttgaaggtgaccacgtagctaggcaggatacaatcatccaaccctcaaacatcacttttaatcattaacccttactttctcctgggacaagacagctaatcattcatcattaaacggcatcgtatctttacacagccaccatgtaggccagttcttgattaggcgtgggcaattatatcgtttattaatatcattaccctttttgatcattcttatatctgttaagaactaggttctaacatagtttatcttctttagtggaagctaaaactacaagaatgttataaattacataatttgcaacggacttttgtatactttcaataagaatttagatacagctgctttgcatctcttttgacccaatctatttcccataaaattttttttttctaacatcttaatacatgccttacaaaggaaagtggtacatgcattacaactatgcgcatgatgcaaaagcacattagtttattaatgatttttgacttgtggagtttggatttgtatatgaacctcttctctcccaaaacttgatggacctatgcatttttatgggttagacattgtgatgtggttgtctttcagaaaaaaatcaactctttggtgcgtttctactaaagctgagctgatcagctaatagagtttatcaaaaaaaaaaaaagcattttcattggcctaactttattaaacttagatttcaaaaaaaactttgttgaagttcacattaacataatcagaagcccaaattaatgatataagcttaaaaagaaaaaatgaagaagataatagtcagaattttgggtcctcatctcgttgttgattgcgatcaattaatgaacttttacataccgtaattaacataatctaaaattctaaagtccgcccaacactatttcaagtttttttttaaagttccgaatctttggcccataaactctttcgacatccgggaccagcctctagtgtccatttgttcatagtaactttttggcccttactacactaaaatcttattttttttttgaaagaatgtaaaatttatattcaaaaaaaaaacgttgttacaatagatgcttctgtttttctaatgatttagactgagaataaagaagagtgcagataatttctgaaaaaatgaagcagttagaagagaatcatggtgaaggacgcgttgagaaccatagtcgtagacaattgtcgtagctatggtcgccaacgtcgttgattgagctgattctgtttcgcacggttttgtcgatgagttggatgagtcgagttgagggggactgcgcttctccgtgacgtcttgcatttctttcccgccagatgtgataaagagatgcttggaagacgtagcgaaacaggaagagaggttcacttggtagagttgagctgcagaggagagcaagtagacgatctcaatcagttgaatattcgtgtgataggagacgcctagtgagattgtcccaaattgcagtggtataatggcaggagaagaataagtggtttcttgattcttcaacattgccacaaagaacacagttgatttgttgtccggaattccactttttgatccgatcacccgtagataatctatcatggatcgcaagccacagcaggaaagagtatttgggtgtgttgtaggagaaccaaacacccttataccaaagtctgcgtgtgtgaagaacccggatgttgtgccaagttgcttttgttgagaagctctgtctgaaattgtcacctgaagaacgccacagtgatatgtcgtcacctaacctcctgttttgacgagtatactgaatctctgcctctatcttgttgtaaatggctgtacgatgtcgcctagtcctgtgagaagccaatacagtttccaccgtagcttctaacggaatccccatgtttattgttctgcgagcatttgtaatatccacaagctgcccgagctgtgaccaattgtcataccagaacgatgttgaactaccacttcttgtctcaaccttacacattgttttagccacttctctatacttaagtagcttcttccacatccaagaccccaagctagagcgatcgtttgtagaccagaaggaacctttccgaatgatataagtccaaacccaattaacccacaaagaaggctgccgagcatatgagtctccagatcagttttaaacaactaaccttatttgcttccgaaagtgatttgatacccaatcctccttcttgtttcggtttgcggagcgaagtccatgctatttttgctctcttgtgattaagctcaggttcagaccacaagaaagcagaacatagcttctcaatttcttttaagcatcctgctggtaggcgatatgcagacatccagaaattggacagacttactatcacataattgattagagcaagacgtcccgcataggagagtgagcgagctgtctaggagcttatttttgatcttactttgtcaataagaggcgagtaatccgcagttgtcatctgcttcgtcataagtggaagacccaaataacgaaccggtaactgaccacttgcgaacgaaaaagcagagagaatgtggtctctattcggttcagaaaccccggcaagataaagtgtggatttctccaagcttatgtgcagccctgacttgcctgcaaactcatgaaaaatattgataactccttcaatcgatctctgctgaccatctatgaacaccattaagtcatcgacaaaacataaatgagttagactgagcttcttgcatttagggtgataaccaatgtttctgcgaactgcagcttcatcaatcatgtgagacagaacattcatgcagataacaaaaaggtacggagagagagcacaaccttgtctcaaacctctcttgttgccaaagaaacctgccagttccccattaacttggacagaaaatgtggccgtcgagatacaaagttttatccaatggcggattttttccggaaaatttagagcctctaaagtattcagcaggaattgccattgaacggaatcaaacgctttcgaaatatcgattttcatggcacatcgaggagagattgaatctttatggtagtccttgactaactccgtggccaaaagaacattttccatcaagagcctttccttaacaaaagcagattgattttggagaataaaacttggcaacatagctttaaggcgattagctataatcttagagattaccttgtatatcacattacagcatgaaataggtcgataatctcgcatcaaggtagcttcatctttttcggtatgagcgctagaattgttgcatttagccctttaggaaggaagcctttaacaaaaaaggattggattgcagcaatgaaatctttaccggttattgaccaagtcgctttgaagaactcacttgtgtatccgtcaggacccggggatttgttacatggtatcgcaaacaaaactttttgaatttcttctgctgttacctctctcgtcaacatgtcctgatcagttgcagaacatctaaatgacatcaggtttctcaagtcgtcaactgacatgccctgaaaatcacttggttgatgtgtgagaaactctttaaagaatcgcacagcttctccttttatttcctcactagtttgcagcaaaacatcattcggtccctttatctcccgaattgagttttgcatttttcttacttgcgcagctttatggaagtaagagttatttctgtcaccaactttcatccagtgaagttttgatttttgtttcatgtagccttcttccagatctgctcaatgctgccaagcggtataggcctgcaactcttctgcgataatttgctgcgtcgggttaactagtgtgttactttgcttttcacagagcaattcatgagcctcacgagtgcgctttggcaagtcccctaatttctctttccccataattctcaagctcggctttaaggtctttagcttctttaagaatctatgcaaagctgaagtagaaataaacaaaggagcagaagcattctagtggctctctaccgcaggcaaaaactgaggtaatgtcgtgaggacattaacaaatttaaacggcttgcgaccccctatcgcttcagcctcaagcattatccttccccttgtatgatcaaaacaacctccagactcaaaaacactataagagtgcgggaaagtagtacaccatgaatcattaacaagaactcgatcaagttttttgcatatcaaaccatcctcccgcttgttacaccaggtaaagcgaggaccatggtatccatcgagaatctcgttaaaatcaccacaaagcatccacggtttgttgcgaaacatgggtgaatcgtggtgatgtctaatgtcttcccacaatattttcctctcctccacataatttgaagcataaataaaggagcaaaagaactcttcctcttttccctccaataaaactgaacaagtaatacaggagttaagcgaacacttgcactccacactacccaaatgcggcctaaacgatgtgatttgtagtaattagtcagtgaagaccaatcctgaaaagtagacgaaattatatctgatgatttgccctcattaactcgcgtttcgagaagaccaccaaactgcatagaactttgagataaccacttgcggacgatggaatgttttgaagatttatttagaccacggacattccaaaaaaaaaccgacatatgattacttctttttggtgacccggcgatctgaaacactctggttaccctttgtgttttgattgacggatcctttaacaaccttgtgcatagttttagaagctcgaggaaaagagggacgagtctcctgcgtacctaccacctctgaagagaccactagctcagctgattgcttagtaacaatctcacctttttcttggctctctaaatcgtcggtgtagtcttccaaagctaaaatcttattacattttaggccttgttaatacttgaaactaaatagtttgagtttggatcttgattaattttattatataaaatatgagttttaaaattagttactcgcataaccatgacacgtgttaagtttatcatttagatgttaatatgtgttagaaagttttactttcttcttaacaaaaaggaaaactacaaaaaagaaacatattcacatatactaattaaatgtctatatttacaaaatttaactttaatttttcttactaaacatgaaaactaacaataagagtttatataattaaattgtatttgtattgcaaaatagaattgtatttgaattttaataaaatcaaattaaatagtattttattatgataaataaataaatatatatatatatatatagtattagaaaatcaaatttgtaagactgaatatttttcaagaaaatattaaattaaatattgaaaaagtatatgagttgctatttaaaattcaaatattcaataaattagagtgtagaaaattaaaatacagtttattacgatgaaatggatacttaagatgtatagtaaaatttaatgtgtatgattggaatttttattaattcaagtttactaaattaaatattagaaaaagtgtgtaaatcactatttactattctaaaatttaaatattatctataaatctttgaatttatatcttacactcgcataccttatccagtactatataaatgatagttcttatggttatgttctaaatttctcttagaaatggacttgtacataagatctttttttggaaatcatgatgggcctctaggacagccactctaccgtcgtatccacttgggccagacatgcttatgcttaatgctgattccgagagattttaaattgataaatgtggaaaaagggtattcgaaaaaccttatcatagtttaggttcacatttcgtgtggtgattgaagaatgcctaataaatactttatatcattttaaaaaaatattaggagattctgtaccaaaacccgtaatcttcccagattagtacactacaacatttactaattttttcctaagcgacactcgaaccgacgatctctaagcttttcctaagattaccagttgatctaacgacacttggaagataaatactatgtctctaaaattttaaaccaaattattcattgcatatgataaccaatattttcttgataatgtgtaggattaaagattgagaaattattattattattattcttattttttattttattttagtttttgttaaagattgagtaattttttttttttgtatgattaaaaattgagtaatttagattgagaaattatctaaattaccattataagaaaattatgtttgaagagtttttgggtggtttaagaagggttcataattaggaagggtatcaaacgcaattctgtggcaatgttggatttttgctgtaatttttgaggaaagaaaaaacataacaaaaggtactattgaaaatcacttttaatatttgtcaagttctaataaaatctacataaattgatagaaatatccattatttagataaaaatataataaatcattaaatatttagatatttacaatcttacagaaataatcttctataaaaagcctctggaatcactaatgtaataacctattattcttaaaaatgtcagagaacaaacatttaaataaagaaaataaaaatactaatcaaaaacatctctcccgcctctgttttatttcaatctaagtaggaagaaatataaattaagcgatctttctctaaacaagatttgagcaagaatcatcatattcaagagatgtctagttacgttggtgttcttgtctctgatccatggctacaaagccaattcacacaagtggagttacgcactcttaaatccaaggtcagtctctttaatatcgttatatcactttagtattcaacaaattgatcttttgggtacttttttcgtagttttattcgacaaaaactcgattcggtcgtgtcactgtgaaacatttaccaccagtgtttgcaaagttgaaatatttcaatggcaagtttgatgaaaatgagatcaaaactatattggatgagtcttatcccaatcgcgctaaggaagttgaattcgaaacctttctccgggtgagtttgttaatgatctataacaaattggcaataagtggattggtccatgtcgtaaactgcgtttactatatgatttgtgataggcctttttaagtgtgcaatcccgaggatcaaaaggcgcttcatcgtttctcaagacaagtactacaacgttccatcactcgataaacgaatccgagaaagcttcatatgtgtcacatatcaatagttatttgaaagatgaacctaacttgaagagctatcttccaatcaaccctactacaaatgctttgtttgatcttgttaaagatggtgttcttttgtggtatacattaatctaaaatctacaaattattctataacatggtaaagtttttagtggtttgtgattccacttcttgttccatttggttgcacagtaagcttataaacatcgctgtgcctgggactatagacgaaagagcgataaacacaaagaaagaacttaatccatgggaaagaactgaaaatctttcactatgtctcaactctgctaaggcaattggctgcactgtagtcaacattggaactcaggacattgctgaaggaacagtaagtattttaaatcctttgttttcagtttcatcttatgttttctaactctttctttgcagccacatcttgtactagggttgatctttcagattataaaggtaattacttcacattactttacttaaagagaatgtgacatggttactaatgtttgtgtttatgttttagatccaattgttggctgatctcaatcttaagaaaactccacaacttgttgagttggtggaagaaaaccaggtaaaatatacattgtgaacattttctaaaaactttgaggctgaagctaaactcaaatattctttgtgaatggttttttcaggatgtggaggagcttatgggactagctcctgagaaacttttgctaaaatggatgaattttcatcttaagaaagctggttatgagaaacaagtaaccaatttctcttctgatgttaaggtactaccttgtccctggtatgcttatttcgtttctttctcgtgtactcgattcgttagttttccttttgtggtttgtcaggatggagaggcatatgcatacctgctcaatgctttagctccagaacacagtacaaatgtcacattagagattaaagacccttcagaaagagcgacgaaggttcttgagcaagcagagaagctggactgtaaaagattcctttctcctaaagatatagttgaaggctctgcaaatcttaatcttgcatttgtggcacaactgtttcaccacaggtcactagcatgaaagctaataaagagcaagtttactagtgtttttttttataactaatatgtgaaaaactctgttttaggaatggattgtctgatgagagtccaaaggtgcctatctctgttgctgagatggtcacagaagatgaagaaacttctcgagaagaaagatgctttcgccattggatgaacagtctcggtgctgtgacttatgtcgataatgttttcgaggatgttagaaatgggtgagtattgcaatctttgtttcattgtttttaatcttgctagagaatctcaaactctcctcctcatggcatatggcagatgggttcttcttgaagttcttgacaaagtatcaccaggctcggtcaactggaagcacgcgaataaacctcccattaaaatgccattcaagaaggttgagaattgtaaccaagttatcaagattgggaaagaattgaacttctcgcttgtcaatgtagctggtcatgacattatgcaaggaaacaagaagctacttctcggtgagcctcttgcaaaagaaagtgtgtttaatgtggtagtttcagttcaaatttgatgacaatctgtttctatctgcagcttttttgtggcagttgatgagatacacaatgctccaaatcctgaacaacttgaggtctcactgccaaggtaaagatatcacagaggcagatattctaaactgggcaaataggaaagtcaagaaaagtggtcgaacctctcaagctgtgagcttcaaggtaaagaaaagagtcaaaccatgtaaactaaccctaatccatcttcattaaacctaacagttttgatggttactctattaggacaagaatctggcaaatggaatcttctttttagagcttttgagtgctgtagagccaagagttgtaaactggagtcttgtatccaaaggagaaacacgtaataacaatactatgttactttgttctgtctctttttgttgttatcagcattataggtatggcttataatttgcatttttaagcagaagaggaaaagaatttgaatgcaacatacatcataagtgttgcaaggaagcttggatgctcaatcttcttgctgcctgaggatattttagaggtatatatattttcgtattgcaccgggtttatttttccgaactttttcgagttaatctgtttgtatgttaaccaggtaaaccagagaatgatgcttatattagctgctagtatcatgaactggagccttcagcaacaatcagacactgaatctactgtctcggatgatactgacgtaagctctgtgaccgaagagatctccaatttgtcgacagacgatggatcttcagatgtttaaaatgatgatattgtaaaagaagtttgaaatttcttatgactaaactctgctagtgaagcaaatggtgcatgtactaagataatgaaatttaatcatcaatatctacaacatgtttattcatttgtgtaaaagttcgagaacgaggtaacagtatgtataatgaagagactcaaaacttgtttttagaaaaaccaataatcatgcgctggtgtctttgtagtcctcagcttctgattcggatttctctcgctctgctatttccacaagcattgcaaggcgcttatcgaaaatcaaagcactctcgtctctcatgtcaagctctaaagcctctgcttcaagccacttctctctcagatcatcaaggagattcccttggtctgtggtcatcatggcacctggtgcacttggaacagtggttcgaagtgaagagtctcctgatggtggaggcaatgttaataacattgccctgaactcgtgggtttcaacaaatgcctcaaaattacaagcaaccaagtccaggcagtactctcttatcttcaacactccgtacctataccattgaagttttaaactaaacctgtcagctcatatatcatccatcaatgtgttactaacagaaacattcttagcaccgcattctacaatccaccggaatcaaagacatcaattagaaaacaggtttagataagaagaaaaccatacatatctgacaaaaccagccattgacagagttctgcaggtgtggcagtttccaagtgaggcaacaaggcgtcagccacagcacgtttaagcggaaacagcaagtagcgagatgcaacatcaaagatctcctcagcctgctaagtaagcaaattatcagagggcagaatatatataaaaaaaaaacactttccaaaatggcaaacagtttttgacctgattcggattgatctcctttaagccatcagtgtacctgataatgcttatagagttagcttaccataacaacaatgctttcttcaacaagtttttttcaggtcttttacaatcacaaatgcttacatatactcaatcatcttctcaaaagcctctgcactcaaatcatgttcttcaagaaatggaagagtatcacccggcaaaccattcttcccctcatgaaaatcattcactcgtgataatcgtgctctgaagtactctgatcttgaagctagaataacttgatggcagtagaaatttcttttatcaactctaacacaaacatcagcaagactttccacagaatcaccaactctcgtatccccaacagatgaatctattacatcaccaacaaacgatttcgctagtgaaactcgaagaatcctatgcaaagaagcaggaagcctgtcttcctctggaagtgatataccctgtaagataaaccgtttcatggagttatcaagatctctatgagtcttatactcagcatatctctggtgaatcagttccttctcaatgattttctgcagtgattcacatttacaaactttgcaaatcctaacaagatcttccatatcatcaacagatatctccaacctatctgaataaaagaagtgaataagactacagagagcaggatacgaaagcttctctttcgaaaaccgaacttctctccggtctttccattcattctcaaacttctgcttgaaaaacggagatcgagcacttaagataaccctgtgtgcttcaataggtctaccttgcacatagaacatcacatccggtggaaagtaattcgaactaccaaactcactcagagtatctacaaaaccagaaaatgcaaacactaagcctctctctctagtctcgagtaacatacaaagcaacaagctcaagaacgatttagacgttactaaaaactggattgtgagtgaaatggtgaagccaaattatctcagtaaacatctctacacattggaacggttcaagaactcaactttctcaaaaactcgattcaaagagctcaactttcttagaaattggattcaaagaactcaactttctcaaaaactcgattcaaagggatgaacttttttcagaaattggattcaaggaactcaactttcttaagaactagatacaaagaactcaactttattaaaaattggattaagagtgaaatagtaacataccagagacatcaagattagcttcttcttgttgaagataatctcgattatgacaacatcccaaaaaggtatctctaagagaagcttgcaaaggagcaagaggaggaggacgagcttcaaaagccttcagaagcttccgaatccttaaattaagagaagcataatgacaacgatcaccatcaaaagtatgttcagagcaaatcgcaccgttctctagaagcaatcgagcagagtctatgtgaccagcgagacaagcgtagtaaagagcaacagagtcccaacggtcacgtgcgttgacgttgactccggtttcaacaaggtaccggagtctatcgacgtcaccggcgcgtgaggcttcgaaaatgtctccgtttgggactttctttaatggtacggatggtttgtagtcttggaggtcgaggtctagatcttctaggtcggattcgagtgtccaagatgaggaattctcaattggagacattttggtcttggaggataaaccctaaagggcaagtttgtgacattgtttccatggatgcggttttgtgttcagagtttggtttggttcgaatccgcaaacttgggttcggttaagcttatttagtgtaataaaattcggttagcgttctaattaatggaatttggttcggtttatataatatgacaatcacttacgcatatgtaggcaagttctggctgtcgtggccggagcgcctaatggagcattgtgattctagagagtcatcctctttttatactttagagaagatttacagttctttttttcatatattttattaatttattatgtttaattggtattttgtgtgttgttcctttcgatatgtattagtttcttaattgagttttaggattttaagtagagattcaatgaattaataggttgattgttgtttggagttcttaagactgtgaataggattaatcaccctgttttagattttaagtttttttttatgtatcaaaagtgtttgattaaatgaatgaaccaaatgtgaattgcacaatatatttctagccaatgaaagttgatggtagaatgtattgtgaatcaaatgaacctaattctaatgcgaatttgactagaaaattacgaacgagagtttagtagtcgagtagtcaaatttagtgattaatgttttgagaggaaaattagtctaaatttatgttcatgttcaaaaacaatgcttcattgttgaaaattcttgtgtcgtgtttctattattcattgaatctttgaaatacccataacccaatatctttaattcataagtttaattgttaagttatctacaatttttatttaattacaatctgaaaacccaaacaaacaacttttttgttttaggtaagaactagtctcaaaaatgcttaaaagtgtatctttggtccttgtagatcgacttcgaatatactactttttggttaagtgtatttgagttaattacttgagcaatcattttaaatattatatttttgtttttttcataaaaaagttatatttataaaccaattttttgcttgatcattaccacaatctactttttaaaaatttcaatccctttcaatctattttcaaattcactttgtttgatttttaaatcagtagattctacatggatttccaaatctactaaaatctaaaagaaattaaactcccctgtttttttaaaaagatatattatctctactaagatctctcattaatatttttaaacatataaaattacatcttaaatttattcaattgtaataatcagttatttaaatattaaaaccccatatagatactgaagtccataattggcctagttttgtttttgaatctggaatttatatatatatatatagctttctactcaagaaaagagaaatatccttgttgcaatttaaaacaatgactatcacaaatctcccaagcgatttattggaggagattttctctaggtttccattgaactctatgagagcagtgcgattagcttgcaaaacgttttatactttatctaaatgtaagagctttgccaagctacactttggtaaagaaacaacaacaaccaaggaaggggagtcccagatgatattgttgatggattacaatctttatttgattagcgttgttgtcgatggtgatccgtatatagagtgtaaaggtaaacttacttggttaaacaattcagaacaagtagagatatctcaagtcattcattttgagggcttaatgttgtgcatattaaaaaaaagatactaggcttgtggtttggaatccgtattgggggctaacaaggtggatcgaacccaggtattcccaccacctaatcggatgcgcaaggttcagttacgctcttggatacgtgggtaatatctcatgtcgtagccacaaattattgaggtttatagattatttcttccatggacctgagttagaatggtatgaaatctatgatttcgagtctggtttatggacgactcttgatgtcactccacactggtgtatatctcttggtagccatggcatatctattaaaggaaacacttattggagtgctattacaagaaactcacgcagccacggattgaccatatatgatcatgaccacataatctgttttgattttacaagcgagagatttggaccgcttctgcctctaccgttaaacgctgagtattatggcgatgtgattttatcttctgttaaagaagagaagcttgcggttttacaacagcaaaaccgtgcgaatccatatatgtttgatatatggattacaattaatattgagcctggccatgtgttatggaccaagttcttgaaagtggatatggaaactgtaatggaaactccatttaaaagtagtgaaagtttcttcattgatgagaaaaacaaaattgtcatgagttttgatgaaacgttaaatccttacacaattagcatttttggagaggctggatactatagagtagtgaatctcgagcaacatgccaacacatggtctaggtcacaaatgtgcacttatgttccaagtttattgcaaatcaagcaacttcctcttattcaagttgaaaaatgtttcatcatctaaaaatacaaaggaaaaacaaaaacgacattggaaaacatcgatattcgatatgatgaaaacatgttggacttgctgcactatggtgaagcctaatgatcgtttctttcatttactcttattctctgtgagcaatattacattgtttcatcatcttctatattattcggtttgtttctttctatgcaacatgatgataaagatttgctaaaaatacaaaatagaataaatgaacaacaatgaaatatatttcttttctcatacatatagtctatctgaaatacaaatgtattatcaaggagccgcctgagcatttctgatttacgagatcacgaggttcataatttgtcatgttattctttattcttgtgcatgcacatttacataatatgtcttcagcttttgtgtgtttcattgctgatttggttgaatttgtttgtcttgacgaattttggtgcatacattcctttgaggacttgtatgactatcaatcaaacagaactcatatatagaaaattgaggacttgtatgaaagagacttttaaccttgtggcgagttggttggaggatgttggacattaagtatgccaatcataacatgagtatcattcttattggacacaaatgtgatcttgttcgcaagagagctattagtaaagaggaaggaggagagtttgccaaacaacattgccttccggcgtctgcaagaacatctcaaaacatagaggaggtcatcattacttgggttttgttcaaaaaaaaacttcaaagtcgtccatttttgcaattttaccattcacgtctataagatgcaaaataatcgtatgaaatccaaaacaatacaaaatatagctttttccgctattgtcaaattttaaaattttgataaataatatatcatttcgaagccctggagatgaggagttcatctaaatcttcagaattttcaaaaacaaatttatgtgatcatgaaaacatatataatatatctaaagtttcaaaaatatcctatattgcgtattatcttggattttacatgattattttgtattttttggacgtgtagggtaaagttgcaaaaatgagcgacttcgaaagttttttttgcacaaaaccccttatttttacaaaatattttataaatatcttgaccaaatatatctttcttttcttaattagtatgacctatatatatatacgaacatggtttcataaagactgctgaaaatattcttcaaaacattgagtctttgatgtatccaactaggtaatacttcttctttctttcttttgttttcttcttgttcatatcatactaaaccagccaatgtgatttacaattcctttgatctcaatttttaacagtcactgggcatcaaagttggatattcacgttctcaaggtgaagctggaggaagatatggtaccatctccaaggatggtggttgttgtggttaaagtctcaaaaatgttgatcctctttgtttttactaggagttggtattttttgtgacatgtgcgcatgtttatctataaaaccgagtatacatatatcattaatgtataggttttttcttcggaacatgcacaaaattcatttagtgcaaaaaaaattataattcaacacgaaatactaaaactcacagttaatttcttgttttagaataagcatttgatcaaattaggcaagaaatagattatataatttcatttaactgtaaaatctaaactctaaccgctcttttataaacctaaaccgacatataatttcatttaattgtaaaatctaaacgggaaaatgttatttaatacctgaactttcaaaaaatggccaaattaaccgtgaactcttgaaatggtcgttttatacctcaacaaaaagttgatttctaatttaacctataatttatcgttgacttctaatttaacctataatttatcgttgacccggccaaatcgactcaccgttaacactccttaacagcacttctaacagccgttacaaaacatggcctaacagcagttatcgttggtttaaggacgaaaacagttgttagttacgctgttaggagagctgttaagaagtgttaacaatgagtcgatttggccgggtcaacgataaattataggttaaattagaagtcaactttttgttgagctataaaacggccatttcaagaattcacggttaatttggccactttttgaaagttaggtattaaataacatttttcccaaatctaaacactaactactctattataaattcaaactggcatataatattgtttaattgtaaaatctaaactctaatccacattgataaatcaaaacaaacatataattttgtgacactagatctaaaccctaaaatggcaagctgctcttctctaacactagatagagtcccaatatctaaagaactccgaaactcaaatggcaaagacaaatgcggcccaaatctctcttttgtgaaatcaaaacctagtagaaaacaattgtcaccttctcttgttttagcaaaccaatatgaatttcccttaagagagacaccatgactataatgacttatatggatattctcgcctagggtgacatcaagaaccctccataaatcagagttaaaatcaggcctggacaaaatacccgaacccaaaaacccgaaccgaacccgacccgaaagatccgattcgaatgcacttcggttccctacctaataccctgtcggatcttcctcttttgtaacttcggttccgggtttgggttcggttgattgtgaaagaaggtctgcacaaattgggtaatcatgtggaagccatccacaattgagtgctatatgtgagatcttctacttctagatgtgactcatttgagcagaaagttgtgacaggtaagattacaagggagagtttgcctttggatgtcaaaacaaggtggaattccacctacttgatgttaacaagagcaatcaagtttaaggtggcatttgacaagatggaggctgaagacaagttgtacaatgaccacttcttggaggtagtcgatggagaaaaggggattggaccgcctactacaagtgattggagggaagtagagaggttagtaaagtttcttggcttattctacactgctactttggtcgtcttagcgtcaagtattgtttgctcttacaagtgttatggtgagatagtcaccatagaaacaaatctgatgggagtgactcatagttatgataaagagttgaggacaaaagctatagaaatgagggaaaattttaacaagtattgggatgaacaaaagaatatcaataggatgttgataattgctagtgtgtttgatcctagacagaaaatggaatttcctaaaatgtgctttgagaaactttatggtgaagacacttcagaagccaaggagatgtataattctgtttgtgatgtcatgaaggctatgttgaaggagtacactatcattttcaagggaccaaacacacaatcatcttagtttaatccgccttcatttactgctgccagagatacttttgcatgtgagttagttgaagatagtattgttgagtttgaaaggatggacgggtcttataaagagatggttaatgaaattagggttactgatcctaaagatgagttagatatctatctgaaggcagaggtagaaaatcctaaaactcttccttgaatggagtgggatgtcttgtcttggtggagactcaatagtcagaagtatccagttttatcagaaattgcaagagatgtacttgcaatgcaagtgtcatctatcgcatctgaaattgcttttagcaccagtggtcgtcttttggagccaagtaggagctaccttactcattatatggtagagaatttggtttgccttgagcagtggttgaaaactgaaatcaagctgagtgaaaacacttttctaacaaacgcacaacttcttgttgatatataattacttgataagcttgagaaaggtaactttatctatgtagtttactagttttagttttagatgttgtttgaaaattctcttatgttctaacacaacttgggtgttgattgaactctttttcagagcttcaaactgaagtgaacttggactaaaagactaatcaaggaaacgactacaaggtaacctcatcactccattttgttttcttttacttctgaacttggtttatggctcaatgttaatatactagacttatgaatcaatgatcatttcgtaattcatttttacttggtttatggtttaatatttattatggtttttcatttttcaactgagcttatttggttttgatgtaacaggaacaagtcatggagaatctatcatgtttggatgttgctttggatttgaacttctttctttactttgaatgctttggatttgatattgaataatggttttatgtcttgctttggatttgaacttctttcttctatttggatggttttatttggatgttttgaatcttgctttttggcttgaacgtatgaaacttttgttatgtcatgctttattgattttattttcaagttttatttattacaaatttacaggttttatggtatatttacttagtatcaagtattttcgggtatattgtagtagttacgaactagtatccaataatattcggttacttttcggtttttcaatggaagtaccagtatctatccaaacccgaaatgtaccgaaccgaacccgaaccgaagttttcaagtatccgaacggggtctaatattctagttccgaaagatctgaatccgaaagaaccgatccgaacccgaaccgaatacccaaacgcccaggactagttaaaatcatagattttgtactcagaaacaattgtcacgacaaaaattaatgaatctcaagattttgtgcctaccgcatcattttctgctcttctcatatcctagagcatacaaatacaagtcggatcggtgaaaactaggctcgacctcgatccaccggttttgtccataatacgggttccaaaccactagcttagcattgtctttcgtgatgtttaacaacaaaccatcgtagtgaaagacttaagctacatctacttcatctgatcgtctaggttagtaaatttagcttcatgctttatacacgattcaacgttggtgtttagattgatgtgcgtcaaataaaccctaaaatcaatcatcatgattacgataaactccttttttctttgctgtacttttgcatgaccaacgtgcttctttacaaagctcaaatctttgaataaagtgttccactttttgcatgtaaatcaaactgctcttagagatttcatcggaaccctagagaggatcttctctaccgtatcccttgaccaaaattaatgtaatgttaaccttcgaaaaacaactctttccagacttcttccgtcaatttaagacatccttgacaatgacaacagaacaacaaaattacaaaccctaaaaggcttaaattgaacttaaaagcccaaaaccgatagttatgatggaaatttattcattcaaattgaagataaatagcgaagcactattgtacaaccaagtttcttctgatcagcataactagagaggaatacaacaataatcgactcttcatgtgaagaatactttgacatccacgcatggcttgcccaaaatccacaacttgcaagtatagaggccgttcatacttggcacatgcgaatgcgacatagaacattgaacatcacgagagaatggttgcaaagaatggttactgtaaagaccatatcactgcttgaaaaaacataaaacttggagattgagatccgaagaagaagaagaagcaaatgaaatacgttatgagaaaactactgatttaagtggattgatactgttatggaagctttggctttgagagatgtgaaagagaaacctttagatcttttaagcttacttattgaagatttcgtgtaaagttggatccttttatatagcttgtaatcgttttgcaaacaaaagatcatactaaagaatattatcttaagagtgaaagagttgtacagaagaacgaagaagatgctcggggtatcaatgtacaagactgcatttggggcgagacatatctctctttttttttacctaaagaacagaggtgatgaacatggaagaaccagctctctcacatgttagctgtagtttcttttatttcatccgatgtaatcgtctgcaagattcaaacaagagaaagaattagaaatccatatactatatactataggttcccaaattcccaatactactaagttgcttcgaaccattaatggtatccttaaaatggagacagaaccttcaagctttgatttgagatttacctgatcttttccagcgaaatcattatcaggagttaagaaaagcatacaatggcactccttcctgatgaacaagtgataaatactttagtacaagatgtaaacaagcaagtattatcagaataaaccgtcaacagatgcaaaattgatcgaactctactacctaaactaagtcctattaaaacacaaaggatcttaaatttgcggtgtatcagaatttgatcaaaagagccacataggccaagagttttacaggagttttctaactatggttaattcaatttccacttgcctagcaatatgtgaatacattctctgcatcaatcttgatacaaccaatacggagcatcggctacctctatggaaactacaacatacgtatgctgctgaatactatccaactaataacaacaaggacgttggagacgatctatataaccagcttttcccaaaggactttatattcttagttctaactatatagcaaccccaatgcttattatgcaaccacatgaagaagatagttcttacctctctctcattggaacacacggacaattccaaaagccttgtccaacctcagcagctttatcatcatagtgtctacatcaacaacaaaggatcaaactttacgaatacatagatagttcaagattgctcggaagaagcaaatcacctgcaagggcaaagcggtgcaccatatgaatctttatgctcagccaaaccctgctcacaaagttaagcattaaacctcaagatgtttacattcactaactcataatctacaagtagaaagacacaagccacttcaatagttaagcagttgatcacaatcttcatatcaacacaagttcatctgaaatttcaataagctccgattgaaatcaagagtaccttaataacgactgaagtaactcctttatcaacacagaagtaagtcccagagcgacgagcatattgctcggagaatttcctcataatctctactgatttctccgacggttccgctgcaaaaacaagaagaagattcaagatgaatccaaaaccgaaatcacaatcactttaaacaaagatctagggattcaaattgtttacttttcgctcggattacgaagcgacgaaacgaagttctgggagtgacaccaagtggactcgaaaggaatccgaagctacaagaaacagcttgaagattcatcgagttttttctggaatttgaagatcgatgaaaagtttcgtcgtggacttgaagatttttcttctcctcttgaaatttggattcgtttatgctttttagatcgaaattttcagatatttttttgtgttcattttccagaaaccaatgctcgccactcacagagagagagactctcagagaatgataaagcttatcctcaaaccggaaataaccggaattcgaccatcgaatcggttcaaactttgcttcaaaactttcggttcaattcggtttagataaagaatttgagtagaattatgaatgaaaaaatcgagttttggtttcggttcgagttggtgaaattagtttggttcaattgcaatagaattctgatttggttttaatttgactccaacgtggttcaattacataaatttctagttttattttgttttagtgtattggattcaattctcttatgaaagttccggttcaattatgtttagataatagaatttaaattttagactaatgaataaaaaaaattggtttattcggtttaaatgagaaatcaaaaccgattttcgtttcggttcacgtggaagaatttgttttggttcaattgcataaattgaaaagtattttggatacctttgaaattgctttgaggtaatttacaagagattttaatatctattatggtccaaaacaaagagttatttacagaaacagttacacactttttattgttcatccaatatacattttcttgcttcaccatttgcttgattcttgtgagttattataaaaaggaagcgagtttgatcctgaaaacagttcaaaagaactaagagatcaaatgcgaaaaaggcatacgattcgaaaattttcatagttcggtttctcagagattaccgatgtttttaaaagggttcacgcaatgtacttacgacttggcatgaaggtattcatctacagtgataggtttagctccaccataccaattgatgagaaatatatcgatgatctcgagtttaaagaagcggaaatcatgatccttaggccaatctgcaaatgataaaaccatcacatgataatacaaatctatcatgaatctgtatcttaagagatgagtgaaacaattaatcacccatcatctctggatgctttgtgaataaagcctttttggctacttctgcttcctcagatcctccttccaatatcagcaactgaaacattataataagataaagaccaaagcattttacagtaagtttctttgtcgtgtcaataagaaaaaactcttttaccttcccggtaagggttagtttagagcaagtaggattcattggatctcttgtacaagttccaagaggagattcactaattgcaagtgaagctctctggtctttaagtgcgtttcttgcagttggatcaagtgttgttaagtaaaagtaaggtataccgttacctttctcgggtaaaccatcactaaacgatacaacattcctgcaaatagagaccattgagatctcaataatgtcaaagcaagaaaacacattgtgatatgattcatggaaaacaagattacccgaagggagcgcctttatgatcaacggatagtgtgctggaagaggaatacaacaccgcaaaaagaattagtaatacacaactgttacactcacattaccttgctgataacaacaatgcaacaatctctttcactaataaagatctcaggtaactatagtgtatagagtgaccagtggtaactacagagtatagaggaaccatttgttactcctagtgtcaaatctgaaatcctaaaaacctttcaatttcaaaagaatcaaacttgacgaactaccaaatctcaggaacccaacagtacttgaaagtcaatatcaatttcaatagtattaaagcttgatgaagcaaatccatagcaagtctcaagaacccaacaaagtttatcaacaataggattcaatctgctaaaaaagctacaaacttctgtaaaaatataacctttaccaatttcaatttcaaaagattcaatcttttatcactgattggattcaatagccctaataaagctcctaataattgagagtggagcaaaagctatcatctaaacttgagaagcaagataagcagaaagagacgagaattagatacctaagaacaccccaagaattctgagagacaagccaacgagcacttgcggcgtagtcatgtctatcaggcttggtgattgtaagaacccgagcagaagaggattgttgtagaattgtcaagaagacgaagaagaagaagaagaagattggacgaagaacaaggacttgaagttccatactttttgtgtcaaaaatgattgaaacgaaattgacaaaagatgactaacgaaaattttaagtcaattcgtcgtcatacccacaccgagagagtaactttaatgttattcttatctctttggatctctcttatcttcttctttcatcatattgtaattaacttataacttgcaggagatgggcaaaatattctttaattctaggaattcacatgtattataccgtttattattataatcgattttttttttttttgtcgtttattattataatcgatttaaattagtccattgtaagatttcatccgtataataaaaattaaatatttataatattttaaatttattttaaaatttatattttttaaaataaagaaccataataaaccgaacatttttagttttggaagtttaaaaactcaagttttttgttcattcgtattcaaaataattttatttcatcttataatatagggtgaattgcaaaagtaactacttttcataaattatttaaggatatagcactataaaatctaaaactaagtaagtaacatgtagatgacatgaaatgtcgacaaactcctcatttgcaaggctttggacgagctgacgtggtgaacatacaagagaaaagattaattttatgtttttggataatattattttgcacaccccattacattttctttctaaaaatctctctaaaataaactgatttagacttctagctatattaaaaaaaacattagatttttttctgattatgtagtggtttgaattttttaaaatgaaccaatatttacaaaatagaaaaatggttgtaagtaaaaaaaattggtgttctaaaaactgaaatagtatagacaagaaagtagagatgcaatatcaaatagtatttcaatttcaaacactgtggtttggccaatgaaaacactctatcatgacaatgaatatcaatcaaaacaaacaattcagtttaaacgcacctagtataacataaacgtaaacagtatattcacaaagaacaatatttgggttctcatattcaccattctttattctagccaatcaaaatatttcaactaataaataattaaaattatttaattataaaatcaaaactttaaccattcttgtataaatccaaaccgatatataatcttgtttaattacaaaatctaaaccctaattctcgtttataaacccaaaccaacatttttactcgtttaattataaaatctaaaccctaattgtactttctaaacccaaaccgacatttgacttcgtttagttgtaaaatttaaacttgtttataaactcaaaccaatatttaacattgtttaatcataaaatccaaaaccctaatattctttttgtaaacccaaatagatatatcctttcattttaattgtatattaaattttataattaaatatgtttttattaggtaacagattggttaaaataaataaatgaataaaaaattatttttaatttacaaaatagaataatatcttgcaaacttttcctaaaataaaaaatgatttgtttgacttaatctcactagaatttcctgtgagatttatagtcctatttattataagcaattttaaaaactaattagctaatccatgtttttaaaattcacttttgtaaatatttactcatcgtcatcgaaattgaaaactttttgtgtgaggctgatgtgagatcctcctttgctatatctccattgtcgtagatgaatttgttttggcgatgacaaagagagaaaatgactgttgtgaaaagagttacaaaagaattttgctttaaaaaaaaactgttggagaagaaagagatgatgatatatgcatcatgttggagagaggagagaagcacgtgtataaacaagggcaaatgtgtatatactacacaatatatgctgaatatcatatccaactttttgaatggttacttgttaaattattaaattttttatggttatacacccaaatttccctataatataactctaaactattacccatttttttaagtaatatgaaatattgtacatatatattatttttttatcgtttaaatcatatatttatgtttattctagatagagagattttaaaaaattagttaaggtaaataaaaaatatgattagtttaaagatattatatatatatatatatattaaatttgataattaaataattaatttcgtttccaattatttttttgatagaaatggtaacttttttcaaaaattaatgttctcaggattggaacacaataaaaccaggtaaataatccgatccattaaagttatgtaatatccgaacataattaaaccgggtaaattttgactcatcttaactaaaatattagtgagagaaattcaaacattaaagacaaaaagtgctgctaaaaatgtgtatatagatttaacattaactagaaaaatgatacataattttatttcctaataaaataggcacatttgaaagaacaaaggtatacatcaactttggtgtcagaaagcttaagaacagaaggaagtttgcatcgagagttacacatatagcaaactggtctacaaatagaggtgttggataccacgttagctctccatgttgttatatgagaacctggcatgatatatgagaaatctcccacaacacaagatatatgtaatatggttccacaatcgttgcatgtatagaaccattcctttgggttcactttcgtttcacatgcttcacaccaatagtcaccactcacattcttgtcaccgaaagacaagaagagaagatgatcatcgtatctatttctcattaccttttttggaaaaagagcacagtttccatccaaaatgtagtcacactcatcacaacgaaataaaacggcgccctcctctctgcatcggctacaaggcttccagtcaaatgtagtgtagtaatataaaggatgttgatggcttccgtgctcaattgtatccaaaattgcagcgcatcgtacatctatagtaacataagggcctgattcgtatctgaaaccagtgaaatgttgtttacaaagaccacacgaagcgttagctttgttgcaagaatctgtgaatagtatgaatgacgtgttgttgcacacgtggcgtttcttccgtggatgatttgcacatttttcgtggagtataaaactacattggttgcaactgtagaacggttctgacaagatctggaacacacacgcttcacaaactatattttcaggttgaatcctgccatggccatcattgttgatttgtaggttatgatcatggctgaaatgttttatcgtgttagcatcaatcatctcgtatggcgcaatttcctcttcttcttgcatcccttctagctctatcatgtcccacacatcgtttcttgttgcacatagtgaatgaacaacaaaactaggacatttgaggcaagtataagccccgtagaacccatccacttttttgcggcagactttgcatttccactctccatgtccaaggcgacgggtgtaagagatgcggtgatcgtggcggttgatgtttatgacccgtggtaaatcgatacactggcgatgaatcatgaaattgcattgaagacaaaagtaaggacttcggtcacctagcgtcccgcaagcattgcaagtgaaatcaatgcgtcttggaacgagatgtagttgatgttcatgggttgtaaggctttcaatacgaaccggtggtgcgtttttcatacatgctctacatatggtgaaattacaaacatcacaatggtgaattttgggatgttgttgatcaaactcctcctcgcaaagaagacacttgttgtcggcgtaatcgggtgcttcttcagatgtgatgtgtttgagtgtgtgttgcgggtgagaagtgtgttttgcttctggaaaaaactcagcacattctccatggaagagtgtatcacattgataacatccataccatcgataaccgcggaaacccgcaccgccgcacgctttgcactctctatgtcccttccaagagtgccatcccacgaagaattcaagtagatgctcgtgcagattggatttttcaagaataaggagtggggcaggtcctttagcacaacgaaaatccaacttgaagtcgcaaatagaacatatataaccgttttcaaaccgaccttcacaccgactacagaatgatgctttgtcacttatgagcagcttgagaggatgatcaggatgagaagtgtgcttgatttctgacaaagactcaacacactctttatgaaacatggattcacatcccacctcattgcaacagtagcctccgtaaatgtaaccaacagacccacacacattacatttacaatgttcacgagaaaaacgagtaataggtaacaaaggatgtttgtgaattggtgatacctccactatttccatgatgattaaaatctctcttttgctctagtttttttttctctttttcgtttttcctctctcatttctcaaagctatacatacataaacaaaattaataccacctggccggccaacacaacgtgaagaccacgacacaacatgaaatcctcttaaagacaaatgacatcattaattaattaagatattgtatatgtaattaataccacaccacgtaaaactaaaatggttggatgtgctctaacagcaaccatgtgagagtctcgagacagctaaagtcaacgaaaggcgatgatactttcaaggttttattcattttaattagggttaggtacaagcacgacgaacgattccagaaacatatttattgagtggttgcgaattggtttcataaaattattgtcgacgaattaaaacttatataatacttccttttttctttaatgattgattttctagaaccaaaaaaattgtttcaatgattttttatatttcttatgcaaaattagttaaatatatattattattatgtctttattgcttctttttttaaaaatttattatcacaagattattaataaacacaaggtaaaaaatgtcattaatgtttttttatatgtatgtttttcaaaaaaaatcaatcattatgaaacaaagagtaataataatctcattacagagggaattggcctcatttcgtatatagtataattatcaaagaagtcatgaagtgaaacacattagttttgttagggatttttctctagaaagaatctacggggtatcgaatgagctattaatctatataatatatcaatggaggtgaatagtacgtaagaaactgagtcatcaacttttttaggtttccataatcccaacattatcatctacaaaattggtttatgatgaatgttgttaggaaaattactttaacagtaattgctcataacgaatgattagataactaaaattacatttatcaaaaaaaacaaaaaaaaaaaacaaaaaaaaactatggtatagcgtgggtgatcacctagtatatttaaaaatataataactaacacatgaaacagtgataaaaaaaagtttctaatcatgagtgatcataaaatacaattgtagcttttttggaaactgcttttttaatatcttccttctgacccgtattaaaaaatttcgatcgctcttccactttgtacttggttacataatttcatagaatataagtaagtatatatagtttataaatcctagaaggcacaaagaataattatccactattagtaattaaatattgtcaaatgaatttttcattattaatatttgtatatggtatttgtttaaatttagagaaataaaaattgaaattaaacatatatatataagaaacaacaaggaggaatatgtggcctagaaaatctctattttttttgtcctcactctcttataggaatacttatggactacattttctttactttcttctatttttggaaaataagttttttatatacaacaattagatgattgtgtcataagcattctaccaaaaacaaaggaaacaaaacaaaagaagaaacataaagtaaagcaaaaatgggtaaaagtgtaaatgtcactggtttcatcattcatatgatgattttcttgttgattttaacaggtaatatatatatacattgtgatatattaatctctttgaagtcttatatattcttactttttggatttatgactaatgtttaggcaactttaataaaaattcaatagctaatgtgaaaaaaaggaaccagaaaagtttcccttttcgtttggagtttctgtttgcatttatcataacgttattttatcaaacaaaaatgttctatttctcaaggatttatatttttgttttaaaaattgaaaacgtagtgtaattcatcatagtttaaaggattaaagtgcttcatgttttttttttaccattgtgtatcaatcccgacataaattttattgctcttgagatagctgagaaatggcatatatgttacgtgaaataaactttacactactaatcattttgtatgagatttaagtagtaatcctaaagttactgtacatcaagttagtagtcatgcaagtaatcatcatagctagagattattaatgtttttaagcatcatcacttttaaattgtggattaaccaaatttttgaggcaagagaatgtagatctaattgatcaaaaccaaatgattaataacttatgtataagagaatgatagatctaattgatttttttttgtataattagaattatttaaatgtatcttacatatcgatcactaatggattaggaatatatggacaaaagcataagaggagagtgcttcaagtaccgagccccttacacgcgtggatcttgtgacaattataaacacgtcaagtccgcagtatgcaaaaaagtttgccaacgtagaaaggattttgatggaagatgtgaactttttcaggacgaaagaggattgcaactaggttgcttatgtttttcttcggattgtaagtgacaattgcaaacttcaaatcctatgtgcaacaatattgtttattattaccaaccatcaataatatgtcattaggactttgtggtatacatatcatatgatatatccatcatatgctatcttcaaatcttatgtataagaatatttaattttttcgttattagtgtaacgcccgtgaaccggaaaatcggttaggatttgtttttaaatcatccggtttaattggttgggttaattggaaaccctagagtgtgcctataaaagaatgaaactcgaaattagggctttagttagccacttttcgttttataaaggagaaaaagagagaaaatgagaatgagcagaatcgttagggtttgggagaaatcagtttcgtcatatcaaatcgtggtaaaaggtaacgaaattaggtatagttatttccaaatcctttatcgttattctccagtttacagaattagatttggattaaaattggttgagttattcgcagtttcgtgagacacgttttctcagacgcgaattaggaccagcggagattgaaactgagatcgtggtctcgtctgttttccgatcggcacgagattttgtgggcagctttgtgacgtctgcagctaggatttaaccggagcgattgaatagttaacggttagcttgtattttagggtttcgtctttgagacggtttgtttctggtttttcctgtccagtttgcttcaaggttgcttttggttgtgcacttgttgcaggacgtttctggactgtttcagacgcaaggagagtctctcctgggtttaattgctattagaatcaatttgttaaggtgagtgcgtgaccatgagcttatctgagcgattgggttgtgtgatgatatgtaggtgtggtgaatgtgttttgggtgaattgttcaatgactggtttatttgtattgtattcgtgattatacctttttatttgcttgtgtgtatagctcgtagatgggaggatcgcctcactaagtatttatgacaatacttacgcatctcattgtgttgttgatgcaggtaaagataaagtgtgattgtgaaatcatggcaaggaagagaggatgatctaggaactcgtttgttttatgtttggtgtttttggttattggaacccggttaggattgtcagttattcttggttttgttgatcgaattatttatttattcataaaatagtatttctgacttgcagtttaattattatgttattggttggtttaattagatatttatgggaatatttaattattattattatttttttaaatgggtcgggttgtttcaatttggtatcagagcgattacggttctatgatgtgtagaaaaattaattgatgaattattttcctgttgattgatgtgggatgagctagggtgttagcatattgaggattgattatggagtgtttagtcaattgtgtgttgttggagtcctagcatcatcttctccgagccttaattgagattccacggtaagttgtttgtgatatattcgattgttttagtttcttagccatttgttcttgagtagcgcagatggttagaggagctggagttcgtggtcgtggtcgtggtcgcggtaggggacgagtcctcgagggtatcggcgagagtgatggccacagtgccacagttgagcagagtgtgggttcgcagcctgagtttgtggagcccggggttaggaacggtcttggtgccgatatagctggtgcagccggagtggggctggtggagctggtgtcggtaccggtgtgcatgccgttggtgctgagggcccaggagcccaggttccagaggttggtttggcgggcctgttgaggcagttgttggagcggttaccaggtgtggtaccagtggaggctccagttgcgccacgaatggcggaggtgcagcagcgggctgcagttgctgaggaggttccatcttatttgaggatgatggagcagttgcagaggattggcacttggtatttttctagtggtactagtcctgaggaggccgacagttggaggtcgcgggttcagcggaacttcggttcgagcagatgtccggcggagtatcgggtagatctagcagtgcattttctagagggtgatgcacatttgtggtggcggagtgtgactgctaggaggaggcaggcagatatgtcttgggcagatttcgtggctgagtttaatgccaagtactttccgcaggaggcgctcgaccgtatggaggcgcgttttcttgagctgacacagggtgaatggtcggttcgggagtatgaccgggagtttaatcgactcttggcgtatgcgggtcggggcatggaggatgaccaggcccagatgaggaggttcttgaggggacttcgaccggatttgagagtgcagtgtagagtgtcgcagtacgccacgaaggcggcactggtggagacggctgctgaggtagaggaggaccttcagaggcaggtggtgggagtgagtccagcggtacaaacgaagaatactcagcagcaggtgacacctagcaagggcggcaagcctgcacaggggcagaagaggaagtgggatcatccttccagagctggacagggtggtcgtgcaggatatttttcttgtgggagccttgaccacacggtggcggattgcacgtagcgagctgagacgagggagtgctaccactgcagggagaggggacatctccacgtcaaggttgctggagggcaatttctagcggttctggggagagcgaagggtgtagatattcagattgcaggggagtcaatgccagcagatttgattatcagccctgtagagttgtatgatgttattctgggaatggattggttggatcattatagagtacatctcgactgccaccgtgggagagtttcttttgagcggccagagggaaggttggtttatcagggagtgagacctacctcagggagtctcgtcatctcagcagtgcaggcaaagaaaatgatcgagaagggctgcgaggcttacctggtgacgatatctatgccggagtctctggggcaggtagcagtgagcgacattcgggttattcaggagttcgaggatgtgtttcaatcgttgcaaggattaccaccatcacggtctgatcctttcacgattgagttggaaccagggacagcgccgttgtctaaggcaccctacaggatggctccagcagagatgacagagctaaagaagcagctagaggatttgttgggtaagggattcattcgtcctagtacttcaccttggggagcgccggtgttatttgtgaagaagaaggacgggagtttccgcttatgtattgactaccgggggttgaactgggtcactgtgaagaacaagtaccctttgccaaggatcgatgagttgttggaccagttgaggggtgctacttgtttctccaaaatcgatttgacgtcgggttatcaccagatcccgatagcggaggcagatgttcgcaagactgctttcaggacgagatatggacattttgagttcgtggtgatgcctttcgcgttgactaatgcacctgcagcgttcatgaggttgatgaacagcgtgttccaggagtttttggatgagtttgtgatcatctttattgatgacattctggtgtattctaagagtccagaggagcatgaggtacatctgaggagagtgatggagaagctgcgggagcagaagttgttcgctaagttgagtaagtgcagtttctggcagagagagataggttttctgggtcacattgtttctgcagagggagtttcagtggatccagagaagattgaggctatcagagattggcctagaccgacgaatgccactgagatcaggagttttcttaggttgacagggtattacaggaggttcgtcaaggggtttgcgagtatggcacaaccgatgactaagctgacagggaaggatgttccttttgtgtggtcaccggagtgcgaggagggtttcgtgagcctgaaggagatgttgacgagtacaccagtgttagcattgccagagcatggacaaccttacatggtgtatactgatgcctcgagagttggtttgggttgtgttctaatgcagcgtgggaaggttattgcttatgcatcacgacagttgaggaagcatgagggcaactatcctactcacgatttggagatggctgtggtaatctttgccttgaagatttggaggtcttatctttatggcgggaaagtgcaggtgttcacagatcataagagtttgaagtatatcttcaatcagccagagctgaacctgaggcagatgcgatggatggagctggtggctgattatgatctggagatagcttaccatcctggaaaggctaatgtggttgcagacgcgttgagccgtaagcgcgtgggcgcggctccagggcagagtgttgaggccttggtgagtgagattggtgctttgcggttgtgtgttgtggcacgagagccattgggattggaagctgtggatcgagcagatcttctaactagagctcggttggctcaggagaaggatgaggggttgattgcggcttctaaggcagagggctctgagtatcagtttgcagctaatgggactatctttgtgtatgggcgagtttgtgtgcctaaggatgaagagttgcgacgggagatcttgagtgaggcacatgcgagcatgttttccattcatccaggagcgactaagatgtaccgagacctcaagcggtactatcagtgggtcgggatgaagagggatgtagcgaattgggttgcagagtgcgatgtttgccagttagttaaggctgagcatcaggtgccaggtggcatgttgcagagtttacccattcctgagtggaagtgggattttatcacgatggattttgtggttgggttgcctgtgtcgtgaaccaaagatgctatttgggtgatcatggaccgtctgactaagtcagcacattttctggccatcagaaaaaccgatggagcggcggtgttggctaagaaatatgtgagcgagatcgtgaagttgcatggagtacctgtgagtattgtgtcagacagggattccaagtttacttttgcattttggagagcctttcaagcaaagatgggtactaaggtgcagatgagcacggcttatcatccacagacagatgggcaatctgagaggactattcagacgcttgaggatatgttgcggatgtgtgtcttggattggggaggtcattgggcggatcacttgagtctggtagagtttgcttataacaatagctatcaggcgagtattgggatggctccttttgaagcgttgtacgggaggccatgctggacaccgttacgctggacccaagtggaggagaggagcatatatggtgcagattatgttcaggagaccacggagaggatccgggttcttaagctgaacatgaaggaagctcaggctcgacagcggagttatgctgacaagaggaggagagagcttgagtttgaggttggggacagagtgtatcttaagatggccatgttgcgaggtccgaacaggtctatcttagagactaagttgagtccgaggtacatgggtccgttcaggattgttgagagggtgggaccagtggcatacaggttagagttgcctgatgttatgcgtgcgtttcacaaggtctttcatgtgttgatgctgaggaagtgtcttcacaaggatgatgaggtgttggttaaaattccagaggatcttcagcccaacatgactttggaggccagaccagtgagggttctcgagaggaggatcaaggaacttcggcggaagaagattcctttgatcaaagtcctgtgggactgcgatggtgtgacagaggagacttgggagccagaggcgaggatgaaggcaaggtttaagaagtggttcgagaagcaggttgctgcatgagtttgcctttccttggtttccagtttcagtgttgttgagtttttgagcttttgagttgttgttcttatttctctttcatttgtattttcgtttcgagttgtaacgatcatgacagttgatgattaataagatgagtattttttttcttggatttgacttgagttgtcttatttaagaatgtgttgtgcggtttccaaaaatggaaagtttcctagaaaggacttgtctatttttggaaagtttgagtaaacaacctaagagaaaggtgtgtttacgagatggtcgggagttggtcataaggatgttctcgaggggatatgatggatggtaaggcatagaggtgtcttacgcgaatccatgagagagtctggagatatgctcggaagcgtttagtattgttgctcgagggacatgagggtcccaacgactcgtgaggagcggggtatgctcctgaggtaccggtaactcgagggacatggtgtctttagagtacgaggggtacggtggcttcgggtgacgatccgagagcacgctttagggtgacgacccgagagtgagttttgtggtattattttctctaagtgtcgtaactcgatgactttgtggctgagagtgagccgacacaactcagggtttgactttgagtggggaagataatatgtgtgatacccgagataccgtaggccgaggcctgagagtgacggtttatgctcgaagattgcggtctgagagtggagagtgagttgtgagcaacaatgactagtaaatcgtgagtatatcgactagatagagagacctagagggggtctggttggagggagtgcggactgtagtgatggttgcacggagttcctcagagtggaagggtgaagctagattcgaggatgaatctatgttagtgggggagaattgtaacgcccgtgaaccagaaaatcggttagggtttgtttttaaatcatccggtttaattggttgggttaattggaaaccctagagtgtgcctataaaagaatgaaactcgaaattagggctttagttagccacttttcgttttataaaggagaaaaagagagaaaaggagaatgagcagaatcgttagggtttgggagaaatcagtttcgtcatatcaaatcgtggtaaaaggtaacgaaatttggtagagttattcccaagtcctttatcgttattctccagtttacagaattggatttggattaaaattggttgagttattcgcagtttcgtgagacacgttttctcagacgcgaattaggaccagcggagattgaaactgagatcgtggtctcgtctgttttccgatcggcacgagatattttgggaagctttgtgacgtctgcagctaggatttaaccggagcgattgaatagttaacggttagcttgtattttagggtttcgtctttgagacggtttgtttctggtttttcctgtccagtttgcttcaagattgcttttggttgtgcacttgttgcaggacgtttctgcactgtttcagacgcaaggagagtctctcctgggtttaattgctattagaatcaatttgttaaggtgagtgcgtgaccatgagcttatctgagcgattgggttgtgtgatgatatgtaggtgtggtgaatgtgttttgggtgaattgttcaatgactggtttgtttgtattgtattcgtgattatacctttttatttgcttgtgtgtatagctcgtagatgggaggatcgcctcactaagtatttatgataatacttacgcatcttattgtgttgttgatgcaagtaaagataaaatgtgattgtggaatcatggcaaggaagagaggatgatctaggaactcgtttgttttatgtttggtgtttttggttattggaacccggttaggattgtcagttattcttggttttattgatcgaattatttatttattcataaaatgtatttctgacttgcggtttaattattatgttattggttggtttaattagatatttatgggaatatttaattatattttttttttaaaaaatgggtcgggttgtttcaattagatatcatattgttgtgattttttgttaaccaaataagctacattacctgcagaatcgcgattaacttagactagtttacagctattgcccgcagattttttttttttttttttgtcatcagatattatttaggactcaaacaagtcaaaattgcgataaattatttacataagtaatgtgtagcggttctgcactaattgctcgcggatttcagaatactattatcagggtttctcaaatactctttataaaagagaaatcgataattttattattaaacagtatatcaaattcaataaaaactggcaaatacattatacattaaacctaagtaggctattgataagaaagctcaaaatcattaagaacctctaaagaatatcacaacttgtataatttaccctaatggagaaatggccaatctctaattacataattgtgtggttaaagaaatgattgtggagtcaaagaaaaataaaaagaaaagtagtaattgtttatcactaactatatgagatttaattgagaaaagaaaaggatattgatacaacaatagacaaaattagttctagctagtctaacacatgtaaagagttgatctacttctttagcaaatacataccatctctaaactctagtttctcttcagaaaccaaaccagaaagaaagctctgaagctgttgcagtgacttgtcataagaaggatcagccacacaaaacatctacaacaaaacaacaaaaaaaacagagcaatcatcaatgatcaagacaaataatattgtaaaatcagtgaggtttgatgtcagattgttaccttgagagtgttatggattcgttctagtgccatgctaccaaaatttgtgagcattcccatgatgaatttctgaaaacatggttgataattgtttagatttgtatatctctggagaaggaaaaagtttcccaagcattttacatacctcgtatatcgtcatttctttgcgaagctgatcttccacagaggcaattgatgtttcaccctcttcctcacctgttagaagctcctcgccttcgttctttccagaatcagttatggattcaacgagcgttaacacactggaatttgagtttgctcctgtagattctctcagaactccctaagtacagaaaaacttgcaaataagcttttcatctaaatgactggtttaaagcaggagactacaattacggtatataccttgcttatccagaagtttactcttcggtttaatgcatcaatgggtatcccaatgacttcagcaagatctttataggtccaactgaaagattacataacttcagtgaatttggaagatggaaatatccatattgactgattcttgtacttaccttttcttttcttgaaattgcataataatggctgcatgtgtgggtgagactgtgaactgcattgctctgtcttcaaattgcagctccaactgaatccatccaagccatttcagagagatgcataggtcagtatctgatttacccaatactcgaaaacatgaaactttcacttataagtatttattctagatgtaccttgacagtgccaagatttttcttccaaagtaatttacgaggggtcttgatttcatgatatcgattggcataatctgatagcagcttgtcgacaggtccaggtagctctagaggttcatcctgaaattcctcttctaatcagcgaatggaagcgatcacaagaatctatacgcctcatattttacgtatgacataatggatacaaaatcagagggaagaacatatgaatacctgaattggtggccagaagtttgttgaaagtatcgttgaggtgagagtatcaacagaaagctcattctctcttaactcagcgcctaaacacaagcaatggacacaaataccaagtaaaagaaccagacaagaacctaccttgcatgagtaaaattgagaacaagagagaaatataacctgtttgagatgcttttttaatgttagtgttcactctcttagaatcaattaggtcgttcagcattatctcacatctttgcatactggcttctccaaaatgtatctattggcataataagagaaggtaaagttagattcaacactatagaaacaatccaatagtttggcaagtcaaacttaagagggacaaaatggagcttgccttgagaagttcaacagtgcgtatctcagtgtcgatgtcataatcagtcttgttgagaagcttttccgcaagcataacacgatattcgtttactagttgctctttagatccaattatatcaacaagcattccaagtatgtctaccttcctctgactgaggctaccttttaaaggatcagcctcgacagggtccggttcccaactgaggtgaaagcacattaaaaggtgtcagacaaatccaatgcgaagcaagatgataatcaagaaaatatacaacaggaaggataccgggaagcattgatccaggcttgcttatcatcggtgtgaaaatcatcgtcaaaaccgacattctcttgactttcttcatccctcattaattcttcaagaagactatccccagggtttccggaaccatttgcattccctccacttccatctgtaagcatagtgacgatacatttaatggtatctttccgcccccgtaaatagtctctaattggttcacccactgcttccagaaatacaccagctggatctattgcccgaagagctttaatagtcgacacatactgatgtaatatatcattggttgaggcaccagcagtgagcaaacggtatttcagcgaagaaataaaagattcaactagcttagaatgttgtccagtatattcaagacactgctttaagtcttcaatggcaggagaactgttgcatcaacaaaattttcatcagagacgcaagatatttcgactacttgcagtttttaaattggctctcaagtgagatatgtgggcataaaaaagtaacatcagaaaagaaaatacctctcaggataatcaacaattatctcaaataatttggcaatccttaaatcttgaagtgtttcatatgcaaaatattctagccgtaatttccaccgaacaattccttcagaaggagtcaccactctggaaaagcttggagatgggcaacaagccagaggggacgtgaggccagacgatgtggtaccataacttacggaatcaccaagataagaaagaagtgcattaaggaattgtagagggactgtctgaaaagagaaaataagatgtcaggaatctccaaattaccaaactaatctgatggagcagtgaaaatctaaccagcaaaaactacctgaatccattctttgattgattccaaaacagaagtcctgtaatcatcaccagccagatcatggactttcgcctacagtataacattgccaaacagggtacaagttactgacaatagatatagtgttataactctctgtgaggcagatgaataatctgatgcataaaaaataccttaaggagcaaaaagatggcagaagcataagcattttcagccatagatgtaaatccaatacttctaaggtcacggaccaccttcccaatgttcttcaccaacttgtcatgtcccaaacgttttccttgggaacagccttcatcaacatccatttctccgtttttatatctcaacttctcgtccaaatccatgcaatcatcctcttgttcttcaataccatctccgtccatgattgcgcttaactcctccagcctttccttaaaataccagtggagtatttctaagaacataataaaaagaggaacaataagagagtaatgattgaacaagtggcaaacgtataaataaaacttccaagcaatcaaactacatcagaaatcacacaaagaacaagctttcaaagatgggtataccaggaaaatgctgaggaagtgtagtcatcagagttgaagacagcattgactggaacctcgaaaaaagatgaactctttctgtatctgagttctgtctatcatctgacgactgttctttaaacgactgcaaagcatgaactactatggacagacacttctcatgatactgcttttcaatagaaatttcttccaaagccttgcataacactatctgaatctcctctccataattctgcccaaaagcactcatttttagtcaaaactagaagtcaatttcagaatattttatagcaaacaaagaatcaaccaagcgtgtaacttcttacatgatgtttcttctcactataagcatcaaaatgttgccaaaaactcgatgcacctcccttctcaaaagcttgctgaaacaaaacaaatgtatcataagagaacaaacatacttcttccacttttactctacaccaacagagcagctactaagtggtacaagctaatcagttatgcaatcagaaagctccaagactcaaactttaatctaaaaggaagacgtttatgttcagtacctcaagtgatctaagaaagtgatcacgaacaagagaatcaagcccatacttgcagagacaatacacatgagacacaaactcatcttcaactaaggaatctccagtaccagcaatgagagactctacagtagtgaaaaatccatcatagctttcagtaatctcctgaatcgcatcgtctgatagagtttctaaaatctctaaattgcaatcagaggaacctaaagcttccatctttttcactcttgagtaagtaacaaaacctcctaaaaccctaatttcttgcccagcaaaatcacaattactagggtttcactggcaagaagataaaatcagaaaccaatctcaatttcatttcactgaagaaacaaaatcaaacggaacacattaatgaagaaaagattgaaatttacattgatgaagttcagagagagaagctatagaagaagattcataaagtttggtcattcacaaacgcaattataaaacgctaacaaacgcaaaaacaaaacggaattaaaaaagacgttttattaggctccattctgattactctgtttttcaactttagttcaaaaaacttgagaatatccgactacaaagatacgacctttcaatacaaaatcagatcatcgtcgtgtgtttaactttaacgaatctaggttttattgaatctcgacatgtcggaggagaaagtcgtcgctgtgatcatggttggtggtccgaccaaaggtataacattctcttttggatctcaaattctattttcaaaacatgaatttttgattttggttttgggtttttgctaatgtggattggtttaggaactcgatttcgcccgttatcgttcaatacaccgaaaccattgattcctttggctggtcaacctatgattcatcatcctatctctgcttgtaaaaaggtttcttctttttactatttcttgcttttgatccctgagaaaagtttggtattgcttgagtcgtgaaagttgtcaactttgaaatgtggattgctcataacttgttttgatttgacatggatcgtttgtctttatgtgggtttgttccattttagtactctacactttggaatattttcttgttgttgtatgatttgtagtgtcaaagttttgaacttttcatagtttcttcaggctcaaaggatgggaaagttctcaactttgtaatgatgattgatcatattatatttgttttgtatttggcatggacagatatcaaatctggctcagatttttctgattggattttacgaggaacgagaatttgctttgtatgtgtcttcaatatctaacgagctgaaaattccagtgcggtaagttgtagtagcatttgtgtttttggtttttggtgtgtaatgtgaaatcgagaattgaacgatgttcttgttatatagatacttgaaagaagataaaccccatggttcagctggtgctctttattactttcgtgatagaattatggaagagaaaccggtttgatttctgatgaaattcccaactttagttcctgcctcatcagtcatttgttttcctgattgatcttccatttcttgtctctttgaacagtcacatgttttcctcctcaactgtgatgtttgctgttctttccctcttcaaggcatacttggtaatctccctttgaaatcgctaatctgcttcatcgttttcattttcttactttgatgtacttcactacttttcgtagacgcacatcgaagatatggtggtattggaactatgctagtaatcaaggttcgttatcctgatgttattttagatgtcactaaggaaacaaacataaagatcaaacataaacatgaatatcgctttttcacttcaggtttctgcagaagcagctagccaatttggtgaattgatagctgatcctgatactaaagaactcctgcattatacagagaagcccgagactttcgtaattatctgctaaacaatcctgttttcttaattccttcacaggctctgaaatttgtttagcttaaattatctactcaatgcaggtcagtgacttgataaactgtggtgtctatgtgtttacttcagatatcttcaatgcaattgaagaagtatatagccaaataagagacacatgtgagtattcattattggcctctctcagagacttgcaatattatcaattagagacctgcttcatcattttcatgattcttttggtcttttcataagttattcattgtataatctctttaaacttggcagctagcaactaccaatccgctacaaggtctgttcctgcagattttgtgagattagatcaagatatattgtcacctcttgctggaaagaagcaactatacacatatgagaacaaggatttctgggaacagatcaagactccggggtaagttggtggtaatcattgtttcagacgttcttggattactccttatgctaagaaattgctttaaacaggaaatctttgaaatgctcggctttatatctttcccaattccgcgaaacatcgcctcatattttagcttcaggagatggtactaataggaaaccaactataattggtgatgtttatattcacccatccgtaaaactgcatccaaccgcaaaggtgagtttatttgtttcatctcatgaattctagctaaacttctcattcagtttgcaaatgaaatgacacacttaaatttctttggaacaagatcggtccaaatgtgtcgatatcagcaaatgttcgtgttggacctggtgtaaggcttattagctgcataatcttagacgatgttgaaatcaaggtaatttggaatcagtgttttagaatgttcttcttgttatgaatccaaaagattcgttgtttaatgttctctactcttgttaaatgcaggagaatgctgttgttataaactcaattatcggatggaaatcttctataggtagatggtcaagagttcaagctagtggagattacaatgacaggcttgggattaccattcttggtaacttcattgttttctttttgttcaacaaatttttcgttatattttttctgattaatttgtttctgcaggtgaggctgtaactgtggaagatgaagtagcagtcataggaagcattgttctccagaataagactcttaatgttagtgttcaagatgatatcatcttgtgatttatcacaatgattatcgtttggattttttttctttttaattgaaacagagaaacttttacagaattgtgtattacatgaattgagttcacaggattagattttgagtaagtgaaactatggaagatttgtaaactctcactgtactttgtgtttagatactaaaaagattttagaagaaagagttttaaaagatctaagataacaaggaatcaaagaagttttgcttcttgattgtgtaatcactagtgttcaatacctccttaggctcctttcttttgtgcaaattgctcactagaaaaattgtttatcttgacttcgtttgtgggggtaggcccggacataataccggaacccgaagaaccgaactgaacttgactcgaaataaccaaacccgttctacttcggttccggctaattacttgatcgggttctgttttcaaataaccgtgggtaccggaaattacccgaactgaacccgatacccgtgggtactttttattacccgaacatatatatacatagggctgcgcatatgggtaacccgttcggattcgggtaaaacccgttcgggttcgggttaaatgggtaatggatttactacccaatagggtaaaatgaaaattttcgatttcggtctagttcgggtacattcgggttcgggtcggcttgggtaaagaatttcaggccctaagaatagccaaacaaatgaaaacgggtattttatgtgtagatagcgggtacccaacaaaaaaaaaaccttaaatattaacaaattttaataatttaattagatttagatatattatactaaattttgacaaacataacaaataatttttaaatagttgggtatttagatctaaaagtaattgatatatttagatttataattataattttagattattacattatattaagattaaatataattaatatttttgatattaaatctatgttcgggtatcctgtttgggtaacggataaaccccggaccgacctgatacccacgggtttactaaaactttacccaatgaagtaatttcttaaaaccctaacccaccccaacccgatttttcggttcgggtatcaggttcgatatcgggtcccgttttttgcccagccctatatatacatatgaggatatatatacactaataatgtgacttgtttaatgatttgagttatggaacaagcttaaaacaaggtttacttcttgttttatattattggcttaaggaaaaacttgttataatttcagatctttcgggttttatggatatttttatgtatgtttgggtatatttggacaaagtttgggtaagtagtactcaaacccgaaatagttttggttacttatggtttttttaactaatacctgaattatcggacccgaagtgaagccgaaccgaacccgacccgaaattgttgatataaccatacggatccaaaatttctaaacccaaaaattcgaacccgaaaaatccgacccgaccctgacccgaataccacatgcccagggctatgttaggggaaaaaaaaaaaatacatgtgggcttaaatggggtttgaaattaaaaccggtctgaatagacggttcattaagaaaaccggcaattaaaaaccgaacttcatagagagtcttctttacgcattctccgtcattcggttaagttgcatcgatcgttagggttttatcgagagagcaaggagagcgatttctcaaatcgactttaatggctgacgacgattacaatgaagtcgatgacttggggtaatctctccctctctgtttcctatgttagtatcatttgtactcgatttcagttgattctatcttcttcttcccgacgaatcgtaaacgattgagaacaattggatcaattattgtctagtttgagagtctatcaacgagattcttttttgaaaatttgcttattgttctggcatcgtagcattgattataatttcatattgtttagatagaaaaccctaatttcgtttgaatcttatacatcggatttcaaattgttgatgttatgtggtgattttcaattgcagatatgaagatgagccagcagagcctgagatcgaagtaagttattatttgtagaagagagattgacattgcttattattattactaggctgattagaatgtgttggtgtgagtaggaaggagtagaggaagatgctgatatcaaggagaacgatgatgttaatgttgaccctttggaaacagaagataaggttgaaacagaacctgtgcaacgcccacgtaaaacctctaagtttatgactaagtatgaacgtgcacgtatcctcggcactcgtgctttgcagattaggtcagctactgagaacaatctttgttgattaaccgtttagttggctcggaaagtttgattctatgtactgttgttggctgatacagcatgaatgctcctgttatggttgagttggagggtgagactgatccacttgaggtgttgccttcttccttcttgttgtgtttttcatgatttgtcagtaaatgttgatatgtatatgaacatttgtgttgtttattgtatgatttggcttaagattgcgatgaaagagcttaggcaaaggaagattccatttaccattagacgttatctacctgatatgaggtgagattgcattagttatatcaatacttttagctcttctttcaaatttgatatcttcttttcttgcgacttacttatgactctgaatcagttacgaggaatggggagttgatgaactgatcgtcgaagactcgtggaaacgtcaagtcggtggtgattgataaaatctggcctatgtgttttgcaaagctttctgctcttgtatggattatgaacttacgatatagtcgcatgtagaacttcttcatttgtcctattctccaacactacaagagtcagggactccaacaaaaatgcatgaacaacaaattttttgtcccaagttgtttttggacatgggtttcgacaagcctgcatgtacatatacaaagaaagaaaatccttcgtgaaaccaaaagaagaaaacatctataatagtttgagtattgagtaagtacaactcaattgataaaccttttctctcacacttcccagcttttgtcgtctcacagagtcagatcgattgatgcataaatgagtgatgctaaaaatcaaaaagcaagattagagaagaattatgcatgttgtttaaagaagttgagaaatagtaatgttaaaaactatgtgaagcgcttgctcgaggattgtttcagcaacactatacaagtgactggactcaactactcaccatagtctcggcccaacgcaaggatagtgtagcatgtttcttgatgaaatacatctttcaaaccaccgtttacaccatctggcatgagaggaatcgaagacgtcatgatgaatctccaaaatctgcagccactctaatacaatggatcgacaagcaaatgcgtttccaacgctggcttcaaagttgaagttaatcactaaattgttcattctaatttctgatttcaatctatttcatatagaacatatgatacactaattgtaacgacgttatcttttttgaatctaatttaccattttccaaaaaaaaaaaaaaaaaaaatgcagggattagagaagaataatgcattaaactcaaagcaaataactgttaaatagaccttgggatacacaacgtacaaaataatgcatctacatatacatttttgcagccattttaacaaataaattctggactttgaacttatttacgactcaatgccactgaatttatgctaacagttaaatcaaatatttacctaacaaaaatattacctaaaatctctcatatattaactccaccattacttcaaacgaaatcattcctaaaatctctcataagtatttattaattttcggttttaatatcctgtaaaaaaaatcgatttcaataaaatgaattaatcatcctgatttttcgttttaaatcatttatttttgttataaccagagaacgagatagaagaaatgagtgtgttattccattgagataaagggttctttatataggtgtacaaggaaagggtaaaaccctagaaacatctagatgatgggtttagatgatgggccttataatgggcatccatctttattcataacactccccctgatgaccattatagtatcataactcgtaaagtatttgaaatgctgcctcataaagggttctcattaaaatgctgcctcgtaaagtaagggtacatccacacatatcattcaatctccccctcggaaacatcttcttcaggagatgattttcaatcaaatacaatatctcgttggaattaataaccataatcttaatgatcaaaattatatggttttcatatagacttataaatatcattatccagtgatattttatcatagataattgtcatcgtattacttatgataactctgtaggagttttaatgattttcaaaacaaatattagtttgatcaatatattttgacaaactcaatataaatatacatttatatgattatatgtcatgttatatatttctttttattcgatcgagtagagttctagagaacataattctcatataattaatccttcagagattatatctttcaagaatttcatataaatgtcatatccagtgttccgtgtcttattgccagactttagatacttaaaaatattacatccaccacaagagaatatatctcttcataataaatttcttatctttgtgaaaatctcattaatttcactattctttcacataaagactcatttatcttccaatgatgtttttatggttttacacatcatgtgcatagactactagtccaaatatctctactagagattataattatatgtctatttcttcttttccatttttggctaatcattactttgtgtacacttttcaatagactttctttcataatcctcctttttgtccataatatcaactgctcatagcatgcaaatatattacgacgtcgatttgcatttgattccattatattttgacatgacatagctagctagatctcttcattgtcaagtacttaaatgtttcatttgtcatgtttatgtctcttttagagatcattcactcttttcaagagatcatcaaaatatttatttcctcaatttggtcatttttaattttgtgctccttcacttttacgaggatatttatatttggaaccagggtctattacgctttatgcgatcttaagactcaatagcagtttgaaattggtccttacaggacattcattatattctggagcatttaatttacaactggtataggtgacttcatcactttatttgggtcagcaaatgcgtctggcaattacaacgctaaattctgtaattgaattatcttttggactcttaatatacattctttactccgaggatcattgataattcatttctatttatctttttcaccagttgtatacattctcccccttatgttggaatagctgactatataatatgatagtcttcaaaacggtatataaatccttctaggatggcttagttatcattcatatccaacatgtattcttatcctccttcgagggttcatctcaacgtgctgtggtggagcacttatcacattcaaagattttagatgaaaactatttggtttctgacccaaaaccaacaataatgggggaaactattaattattcattggcttgatgcgtatcgatgttactaaaccattttgtgtatgaacatgaatttcaaaatgttaaacacttatcccaacggatatccaataatggttataataaataaacactgaaatactcttgtactttaatcaagaaagtaacctcgcaaactctatgttgcgggtttataacaaggataaatatgaccttctagtcgatgcaacaatcgagtcaatgcgtccattgaatcgatgcatcttttatagccattaggtatctaaatgtcatacagtaggtgatcaacccataatcatctccttgcatatgcttacgaatagataaagtcaaaattattttgactggtataaaaatcacattatcatattgttttctcagcaagtaacaattgataaatcattaggaagaatcttctggtttttcacctaatgtccacataattctcaatactttcgcatcatcattaaaccaggatgaccaatccggttaagccaaatatactcttgaaacttctagtttttttttttttttttttttttttttaaaacttatgatttacttttcattgcttatcagttactcccttaatgagattttataatcaaaattactttcatgtattttaataatcaattatatgttaatattaggggtgggcattttaaccaaaccgaaccaaaccgacccaacccaaccgacccaaaccaaacccaagcttagactcaaaacttttatatttcatttgttcttccgtttatacggttaaatgatttttttgaaccgaactaaatctcaatcgaactaaaaccaaaccaaaccaaactaaacctgacccaaacgcaaaccaaaccaaattaacttcggttgagtatagttagaattttacaaaacccaaataaatcgaaccgaacccaaaccgaacccgaaattaaaccgaaacgcccacccctagttaatatagcaataaacaagacaataattgaaatattatattctagtataaaagatattaaatttaattttgactagctatgtaagatcttatattcacttcagaatatgagtattacttatcatcaaataactcatatattttctcagcctttgaaaaaacactcgattcataatagttcttaaattgtttttcaaaatactgtgtctacaggacaacaatacttgcgtaaaagtttaagcgtttgttttaccatctccgcatcagagatattctcttaacaatgtgagttatattcacaaagagacttcaagtcttgaagttttagtaataactaattataacttgcttctaataacacattcatataagagttgctttatacaacttttagatctttagtagtcaaagattgaacataatcttctggatatgtcacgtattatccatttattacttctcctcctcgagatgatgaaacttcaagttcatccatctcgtattgaattccactctagaatcataatgtattttatatctcatcatattaactttaaaatttggagaactataccgcatcgatgattttaattttgtattcccatagaaaacaatgtatatgctcttctagagtcttttaataagattttatactacttgatatactagattatttcatcgttaaaagttagaaattttacttattttttactatatttattttctcaacttctggtgataatttaagttcttgaaaaaactttgaccattaaaattatgatatcttcttaagatacattaaactagtcattcatgaaaatttctataagtgattatacctttaaattaagttatttataaatcaatttatttcataaaataatcaagtattatataccaatacaattttaatgcaatattgtaaaaccaatcagaataaaactattttgtgcaaaatctggattttacatatatcttgacaaaacttttatttaggataatatgaatttgtgcaaaatttgggtaaaatgatttcgtgcaaaattagggcaaaaccatgaacagttttttttctcttttaaaaaattaatacaaatcttttaaacaaatttttcgtgcaaatttagggtaaacaatattcataatcaactctattaacgtaaaactaataatgcatcaactatgaaattttaattttcaaagaagtattaatcttcaaaatccttttcaattaaatattctcaacaagcaaaaaaaaatggagagaacatcaacgaagttcgcttttgttgccttctttgttgttacattcggtaaaattttatttcatgtgtgaataaaattaaaaatctctacatgcaaattttatgtttataacaacaagttagtttggttttgtagtgatgtgcatcgtaactacacgaaatgttgaagcaaaacgtgtattatccgaagaaatgccacaaattgctttgcatcatgaagctttgcagcaaaatgcgaatcgatggggtcttgggtgcaaaaaaggatgtcatttgatatgttatgctcctgatccaacttttcctatatgtcgttgtatatgctagtttttatacatcccctcgtttaatttagtcaaataaataagatatgttttcattaataaaaaaaaatatttatacaaccacatgaattaaattggatttgataataaacatatggggatttctagccttcaagcagcaaaaatctatatagttgaaccggcatcgtttcaaatttataaatcggtgaaaattttattaagttcagaaacttattttaggttcagtttaaaaaagcgttagatggtaagcaggacggtgatttagcgcctaaaacgtttaatcatagtctaaacgattttagatggtttaagcgtttacaacataagacattataaatataaaattttaaataaaaaaatatataaaagtatctgctaaaaaaataaaaatattaaatagtaaacaaaaattagacaaaaatatatttaattaattcatattaaacaatatatattaagataaaacttattagttaaattttggagttggaaattaaaaaaatatattgaaaagaaatttatatgaatttaggcggacaaaacgattatatagatgtcataatatagatgggatttagacgaccgcctagaccactttagtaaccgcttttgcaaaattgatttttgatttaagaatattactcggttccggtttaattcggttaaaccaacaaatttggaattc

SEQ ID NO: 169 - DNA, 103889 bp, Arabidopsis thaliana
gaattcactgtaatgatttggtttttgtttgttttgatttctccttcaggctttgggaattagatatatttggggttaagctcgagtctctccggttttgagtttacttgagtttgttagtatttatggctgaggtgggaaaagttctggctagtgatatggagttagaccattcaaatgagactaaagcagtggatgatgttgttgccactactgataaagcggaggtcataccagtggctgtaactagaactgaaaccgttgttgaaagtttggaatctactgactgtaaggagcttgaaaaacttgttccacatacggtagcttcgcagtcggaagtagatgttgcttccccggtatccgagaaagcaccgaaggtttctgaaagtagcggtgcattatctttgcagtctggttcggaagggaatagtccttttattcgtgagaaggttatggaagacggatacaactggcggaaatatggacagaaacttgtgaaaggaaatgagtttgtaaggagctattacaggtgcactcaccctaactgcaaagcgaaaaaacagttggaacggtctgcgggtggacaagtcgtggataccgtttactttggggaacatgatcacccaaagcctcttgctggtgctgttcctatcaatcaggataagcgaagtgatgtcttcacagctgttagtaaaggtgaacaaagaatagatatagtttctctaatttataagctgtgcattgtttcttatgatatcatgtttgtagagaaaacatctggatccagtgttcagacacttcgtcaaaccgaaccaccaaagatccatggaggattacatgtttcagttattccaccagctgatgatgtgaaaactgatatttcacaatcaagtaggataacgggggacaacactcacaaggattataatagtcctaccgcaaagcgaaggtattgatgattgatatgtcggtttgtttttcatggttctggaggaagacttcaccattggtgttccttgttttttcttcttatgttgatgtcactaaatcaggaagaaaggagggaacattgagctgagtccagtggagaggtcaaccaatgattcacgcattgtggttcacactcagactctgtttgatattgtgaatgatgggtaccgatggcgtaaatatggtcagaaatcagtaaaaggcagcccatatccaaggtagtgactgcttacatgtttgaaatataatgtcaaacttttggtttcattcttcgctgctcacgttctttctccatttgatgttttatgtattaggagctactatagatgttcaagccctggatgccccgtcaagaaacacgtagagaggtcatctcatgacacaaagttgcttataacaacttacgagggaaaacacgaccacgatatgcctccaggaagagttgttactcataataacatgctggactcggaagttgatgataaagaaggagatgccaacaagactccacagagctcaactcttcaatccattacaaaagaccagcatgtcgaagatcacttaagaaagaaaacgaagactaatggctttgagaaaagtcttgatcaaggtccagttttggatgagaagctgaaggaggaaataaaagagagatcagatgcaaacaaagatcacgcagccaatcacgccaagccggaagcaaagtcagatgataaaaccactgtttgtcaagagaaggcagtaggaaccctggagagcgaggaacaaaaacccaagacagagcctgcccaaagctaagcattcagtgttgtaccgagtggtaatttatatggctgttttaacatagattagtacaggcgatatggttatagactgtacagttgttgttcaggcgggaccagatttagattagtgtttaatggaatagtatgctttaatacctttatgtaaccacttccatttggttcaaataagagttacaggaagagaaggtaacacaacaagagcccttctttgttgatggagcctgtgtaatagttgtagcatggggatgtatatgatttgattcaaccttattaatggttatgagacaaaactatctattacttccagttctgtcttttgcattacattcttggagacgtttattctttcacttccatgcacaagatgagaccaagattcggtccatccaaccaaggtacagagcaccatctctttcttcaatcgcatacccgttgctgtaatctctcaagagggctctaatggtggctgaaatgattgagctcaaggggtatggctcaaaacccgccatggaaaaccttgacttccatttcccgagaagctcgtgtctttcgatcctctcggctccttcacaagctatgatgttgacgacatcccttgccatgcagtgctgctcgatattgatcctttccttgtgatttctcggaagcataacatcgatagattcgaacattgccgtgtaataacttaatgtctcaaggaacctaggaaggaaaggggaagtgttcgtgttgcattcttgttccacaagagtgactactttaggtgatagactcttcaccatcctcagcaaccggtccctgtggttttccatgcttacactctcatctggcaaatgatgcagcatgtaagcaaagttcactccaagggcttcgccatctcggacatcaagattttccacttcaacttcacaacttggccttgaaaccgcattgaacctgaatggaacatcaaacttctttgcaagtttctctagtctcttcttgactgtaaccaagacagatccatcaccaactccggtaattcgaatatttggagccccaccaggcctagctgcaaaagcctggataagtgctatccactggctcccttgtccaatttggaagtcaataatgtgaatcctctcttcatccttcattgcttctgcaatcgcaccattcgctgacatgtatccaaacttgaaatatggacaaacctcatgcagaacatacacataagataaaaattcataactctctggttctctggactggagagacttatatatcgaactaccagaagcagcaagcctagcaacaagcccttctaacatataagctcccaatctctggattggctcaccagaaatcgaaaccataccgcgcaactcacccatacaccatcgtgccattagaagattattctcagaaacagcttttgcacaagcaacaagtaccaacttcaagtctccccttgatattgcctccactatcaataacaaatctttagcatcatcaggccacatggagagttcatggcagatagcatcatcgatactctcagctatctctggcagtggctgcaacattattgaacctcttacattgtccatcacaaataagcaagtaagaatctttgaacatcaaccattatcctcaaatgaccttttatttatctgatcttcataacaaacacctgtagaattcatagacaaagtcattaatcagagactgaattagatatcaatattgaacaataatatccatggagatcaaaactctaacaagaactctagtatcattgaaatcaactcatgactctatgaatctacgtcagccatgaactacttcatcaataaacaaggcatacaagagttccaatcctaaacaaactaatttgacaatttctcttcacactttagagtaaagcttgctagaaagagcaatcatttacaacaaaccaacatcaaacttatcaaagaagaaatgttttcatgttttgtggataagaagaagcagagcatcaaaatcatcaagaaaagagaataaaggtttgatttttatgagaaaaacaaaccttgtgtaggttaagaagtgatctttcggtggaagtcgataagggatttggttttgcaagtgagagatccaaccaaagctcgcagctgaagcaaaaggaagaatctttttagttgctgtagtgaagaaaataacacatcacatacgacgtcgttttaggcttaaaccgaataagacccgatcaccgacttgacacatctcgcttaaagtctctggtcaaatgggaaatagtgtaagaagcaatctaagagacatcagaggacgacgatcgatggatcctcggatgtggcacaaagtcgccgctatttccggtgagatttaagataaagtaatgatcttttgattttgatcttgtgaggaaaggtactgattcggatagaattggtttaggtatggctgctcttggtttgggaacttatggtgctcatgtctttaaaccagagaacccttcttacaaacaggtttagattcttgaaaattgttggaaaattcgatactttgttggatttctgtgagaaagtttaggtttttttgttgttgttcaggtgtggcaaacggcttcactttaccatttggttcacactgctgctcttgtttctgctcctagcaccaaatatcccaacattgttagctttctcttcttgtactctgtttctctaatctttgtcctttgagagttgatggagctgacatatctttttcttgcttagtttggtggcttgttgactgctggaattgtagccttttccggcacgtaagttgttatctttttgtttctcagattcttcagtttgagatgtgtatggtagagcttttgtgctagatgtttgttggatgtcttgtcattgaggttatagtagtgcattcatggatatttgagctatttagatatgatttggactttctagaattcatatctaatctctagcagtagcaatacttgccacaattcttcgtggctagggagattttatcgatttcgacatgtgtccaactctgaagcatttggaaaccattgtatcacttatttaatagcataggtctttgtatttgagttaatgaatggtatttgtcccctttgtacttcctttgatatgtgaaggtatgctctttggagaagtaactatattttagatgcttagtagataactttagttttgtgttcaatagtctatttccgggtatgagtatgtgagaagtttcatgtgtgttgaaatgttgttgcaggtgttatatggtagcgctgcgggaggacagaaagttttcgacattggcaccattcggaggctttgcgttcattgctgcatgggcaactttacttttctaaacaatctcataaccatctatattgtcaagtttgtggtcaagcttatcctacatatgaactcactgtttttttttgtttacctaagagattgcttaataacaattctgtgtcgacaaccattaagcatcttcctttacttgttcagtttgttgctaaagggattatgtaaatgacgaccatattaatgtaatcttattaccatacaatttatcaaaattctacattacaagaacttccaagttccaacaaagatttgtttatattgttcaccggtagtataattcatcatctttcatttcatcttggtctttcctttgaatcattggacatactcaaaatggcacatactcaaaatggcacgaatcgtgacctatcaaatcatgagataatcagaaacagatggttcaagattttgattgatcaaagagcttaaataactgtaacaaaaagggtttagataaagttgcttactagggtcggtttgtgtgataaatgcagtgctgttgaagttacaggaaccgccgttgcgcttataacgctggtaatagttattgaagacaacagaggcatggtccttgacagtgttgggcaagaagcaaggctggttaggctgaatcgtactgcagtctgctccacctgtttgacaagcccagtctacggctgcttgtatcacattatctggtatctgtccatcggctacacaccattgtccgaactccgctttcgctacaaaaataagataccccatgttatagagatctttgagattatgtgtatgttacaataatattgtacctgaaaacgttactgttatgaaaagtagagcaattgctatccctaaacaaaaagttttcatcttttacaagaggcaagttgaactgtttgagagcttaaagatggttataactcgagtattttatagtgttagtattctgtgtttagaatggattatactctgaccaacaaaataaagaatgaattatgtaagatcttatatttaggtgtaagtcatatcaactgccaaattttgttgactatgaatttgattcaaatatatatgagttatgttatatggaatgtggtcaagcttatcatatatagcttattttgtttcagaatggataatgtcaattaccaaattgatgtaattttaataccatatatcttattgaagttctacatttgaatataatatctgtttcattagctggagaagaagagaaaagtgaaacatctaatctttattgcatgtgcaccaaaaataacaaatgagtaaaacaagatatgtaggtgaaatttattgcaccaccaactttgaaacacaacaatattggaagcagaactttaagcctcctaaaaccaaaggatttagccagaattgcatactagggtcgcaatccatgatcatttttgagtggcactcgggagagaaccatataaattaaaatggtttggttcccgcctaagaggatgaatgtgcagaccaaataaaatgttttggttcccagcttgtgagaatgtatgtgcttagctcggaacctcttagtcataaatagataaatgtttttaaaaaatcggtgatgcgccattaaagtaactagaacctccattgtgcttataacgctggtaataattattgaagacaacgaaggcatggtccttgatagtgttggcctgctggccttgaaacaagctaaggttggttaggctttaatcttattgcagtctgctccactggcttgacaagcctagtatatggttgtttgtaacacatcaccaggtgcctttttataggctatcaccattgttggttctccacttctattatgaaaagaagattcatagacatttgtgaaactgcgtctatgcaataatacttttatctgcgtatccttgtcaagaaaattttcatcttctcaacaatgatgcgaagttgagtattttatagttctcgaaattctttaaaattttagcttcaaagttaatcaaacatttgatgcactactagttgtaaaaatgttagtttttctttaaatataatttaatattaaattaaaaaaaaaacgaattaatacacaattttgtaattgatgtacatttattatttaatgcaacaatttttatgtgaatatgttaaaaactaattattaaatttgcctcatttaatttgggatgtaaaaatcctatgggatcattaaataccgtaaatttaagtcattatatagtacatttacatctgtcatctttgatataaaacttatgcaataaatttttaagatttcttttaattttgtttcttaaaagaaaaataatatgttatctatctaacaagtttagaatatttatggtgatgaaaataatttatggtaacatttataattttatatacaagtctatttaatattaattaatcaacaccctaattttttgtttgtataaaagacaaagattggttgaagggtgaaaaactcaaaaccccaatatctatactacaagcctccgagtcgctttcttctttcacaagagaaacaatgtctgatcttccaccggatttggtggaagacatactctctagggtcccagccacatctctgaaacgattacggtttacttgcaaacaatggaactctttattcaaaaaccgaagattcacagagaagcacttttgtaaagctccaaagcagtctcatgttctcttatggaaggattatacggtttgtccaatgagcatcaatctcaacttttctggttcgtctatagagtttaagagtgtacttagcctaaaggattcacattataattcagaacaagtctatatagccaaagtttttcactgcgatggtttgttgttatgcaccaccaaggatcatagactcttagtttggaatccgtgtttgggggaaaccaggtggatcaactttgaaaatgattacaagccatattctaggttttctctaggatacaaaaataacaaatcatgccgtagctacaaaatcttgaggttttggacatcttatttgacaccaaaccatattggcctaaggtataatatctatgagtttaccactgattcatggagggttcttattgataaagtctctctcaactactttctcatagaatcagagaatggtgtgtctttcaaaggaaatacttattggcttgctttagatgaagaaacaaatttcttactcggttttgattttacaatggagagatttaaacgtttgtgtcttccctcaaataagaattgtgatacgatggttctatcggttgttagagaagaaaaactctcagtatcacatcagaacttttgttcatcaaagatggatatttggatgaccaatagaattgatagtgaaaccgccatgtcctggaagaggtacttttctgtggagtttaaaatccttagtatgtgtcattctttaccgttttgcaatagttttctgatcgatgaggaaaagaaaattgtcatatcgactgtaaggggtaatgagaacatggtaaacattattggagcgtacaatgcgtattatgcagaagtccctgtggaatctacaaattggccatgtagtccatattttgtcagttatgttccaagtttggttcaaatccagcaatgtaaaagcaaagaaaataataaaactagtcttgaaatgtaaggaaatgttatcttggtgcttcgttcttcggttttgtttttctaaacaaatgtaacttttttttttgttgaaaataatattaaattatattcaaaaagtaaataacgttgttacaactagtgcatcatgtgttatataggagatagattaacagcagagattatgagaaaacaaaaatttaaatctgactttggagtcagctttggaagctagcatcttatcgacggtctttctgtctttgaatgctgatgattctgttacgtatttgcttatctatccattgtgttacgcatttttctttttgtaaatcacttgttaattactttgtgattccttttcaaacggttttgatatacataaccatccattccacacatgatgcaattttcgtttgtagcttaaatcacatcagctgttataggctacatatatcaagaaaagaagcttcgccggactcggtttttgttttttatctctttttctagatcagaggctctccttgttgctttaaatctggtcatgtaataataataaaaaacaatgatcagatattagcatgagtcacattcatgaaaaccaaaaccaagtatctaaaaggtatagataccacacaacacagagaactgcttaaaaaacttattcttattgataataaacttctgttacaagtattatctcggtctttacttgatctattctacccaaaagatcaaccccgactaagaataactaagctctaattctcttctctgtttattatcactaacccgtgaagacaaagagaactacacactcaccttcaagcttttgcacggctttgaagtttttactaagtatcgaaaaatatcccagagtgctcaaagcggctcaccctctgctctagaatatttataccaattctccagaaccctaaccttaggatctccaagaatctctcgatatggaatcttccttgtttccaagcctattcctttccttattcttcgatataatatctcctatattcttcgatataatatcccagaaaatccagcagggaaagacagaaagtgagagagtggaagtacacacttacctgcatccaatgcagcctgcagaatactgacgccagttggacagctgctcgaagacccaaagaattgactggttctgttgcggttgtacccctcctgcttgttgcctgactctgggaggcactaatggaagagcgtttgagcattgaaatgttccaccatcttttctttgtcaagttttgcaggatgagttgatgaactgatacaatggcatttttttcccttagagctttcctgcttgcacaattggcggcatatcattgcattcttctctgagctattgcggttggtgtacctaacatccatacatttaatgaaacatatcaatccttactaagatatatgctatgtagaaatccaacaaatgtttacttaaaccttaagagactagtgagagattatgaagagagaaaggaggaagagagattattggttgtggtatcattttttatgacttgagtataaataatatcaaagataagtctccataacctttgcaatatatagtgtttatttgaaatttttgaatttgtttttaacattactttgaagttaatcgcttgtaatttttagattattatattaaaaagaaatatatctcatatcaagtactatacgtgacataacaaattttccaaagacaaattttccaaagcattttcaaataaaatatccacactttattgcatttcttcgttttaaagttttgtattttcattaatttatctatttcaaaattatttaaaaactaaaataaaagaaaaaatcttaatcatattttcatacaagaaaagacaatgaatttaatgataaattactcaactaaatatgtgttataaaaaggtaattaataccaaaaaatctttagcaagaattcatgaattagtttttttttttaattaatattttagaaaaaattgattaattatttctcttttttggtagattttagtaccatacatgttacacattcacatattttgaggtttatttttttctccttctatattttgaaaatacaaaaattgatttggcattatatttaactggttatcctaacattttgatgtttttataaatatctggcttagcccttgcattagaacacatgaacaaacacactatactaaccgtattaataaaaggtgaatgcatgatatcataagacttggttatcaaaaatagattacctttataagccaaatgttttcatacatatctaaacctttataaaacttctctaaattcatatctttcactttaaggtatatctgctaacatagtagtcaacatggtttcagtctaaatagtgcttattattgcgattatattcatatctcgactataaggcttgggaaatggattacccaataaaatattctatttcattaattaatgcactataagaaaacaaagcacttttttaacaagtgcaaaatccttccatacaataaggacctggagagtttttgcaacgaacaagttttggacaatcttcctgaatgtcacaactcatactgatacatgaatactttcctccttttttaggacaccataggccaccacaataagtgttcgatccgcacaacggaatatagctactaagcttatttcttgatgcatcggtctcgagcaacatgaaagtacctacatgatgtacaaataaattatttaacaatcacatttaaacatgtttcagaattagtgttgttttagatgcgtataatagagatataaagataaaaacttacaagaaatgagaaagaagaaaatgaaaagtgattttgctcttgacgtcattgatagattagaagattaaaaggtaaataagttttctcaaatttcgtgtgtttgagcaaagatttcagtgactatatagctgtttgattgttcaaattctttttgtggtctttgtattatttccatttttaatttggttgttcaaaggtaaccatttaatattagatttttttggtcaacactaccttctaaatactttgtagaaaaatagaaataatcatgcaaagttggcaccggcaatttctttagcggatctgaaatattgatctaagattttttttttcctgttttcagttcaaatttaaattgaaaacttatgaagcatatagatatacatagatgtacatatatattagatggtagatatttattttttccattaaaatatagatcgatatatttttaatgtcttctgacttttttaatgaaataatctgaatatgttgactattaatttttctttttttttaatatggtgacgatcattgagtttgttttaaaagaatatatgttgatggtgaaaaactaaaattatagtaatccatcaatttcatagtattcgttttttaattaccactactatttaaaaaagattcaatgttataatcttaagttcatatttttttagatagaaaataacaaatcgaaatttcatatacataaatttaaaagaaaaaaaggaatagacttacatgtaagaaatagtaagatgaacaacagaaaaaacgctttagatgccatttgttttggagtggataagttgatagttcaagaactagaaaacaaaaagaatgaatcagaggaagacgaataaaagtaattctttagaaaataaaaagaactttaaaattattagtatttaagattaaatttaaagtaatagatattgtggatagtacttgaaattcataaattttatttcatatagaaatatatcttcaaaacttaattacttgtcaattttagtttaaacttaaatcacaatatttaactgaacatgaaattttgttttaaacacaattctataccttataaaagttatttcaaaaatattaatttatagtataatattcatttaatcgtttatgtaaatttataattgctacagtatttttaatttttaataattatttttttgtagatatatttggttctcttgttcctcaccaaatttggtgagcaatacttttgttgtataatcttccttataaaaaagaatgatggcaaattttgtggagtccatatgtattaaatatattacgtacttctttgaaaattaaagaaaaacaatgttcattttttttttctgtttgatggttaccatttaaagctaatatatcggtaacgagggtgtatcatatcttattatataaaatacagttttaaaaattactaactcacgagatcatgaaacgtgccaagtctaacgataagatgtttacatgtgttattaaagatataactttttattatcttaaaaaataagaaactctaaaaagtaaaggggaatttgcaaaagtacctttttctactacctttttgcagcaataacttttctgttgtccattttaaaaaatacatgttctcttgagaaaaatgaccaaattaccctcatctaatgagaatatgaaattataaactgaaatattttggcgccaaaatatttttttttctgacaaaaagaaaattctgccaattgttttcccgccaaaaaaaaattcgcgccaattttttttctccgtaacaatttttttccagctaaaaacatgcattgaaaaaaaactagtaaagttttttaaaaactttgtaaagttgttaaaaaccctcgtaaatcattttaaatcctgttaaaatctttataaagttttcaaatatatatctgaatcttcaatctacgtttaaccttattttcttttaatatatagaggatattatatttaattacatcttttttttgtgaatgagtgtaaaatttgttcaccaaaaaaccatgttacagtacatgtggatccgtatatcgaatgttgtatcaaatggtttactgaaaaaacagacagaagttgggtgttaattccatatactcagcccatcttccagtttgtgagggtcatgtagatgggtggaggagactttgttgcgtattagacgatccacaaacttaattatttggtctgcatcacttggtggttctccatgtctgcgtttattccatttcaaccaaatcatgtggataattgcttagagattgagattgactcgtcaacttaatcagtttctggatccttaagggtattcttttgatatcagagcatcagtgaaattatgtaaaatagggttacaaacttacaatatcattgaaccaaaaataaaaatccttaatatataatttttttgtttgtttcagcgttgcattatcaatatgctattctatttgatgttataatctaacgatttcatcataaaatcatacaaaagaaaacagaaaataggcgagaaactttaagataaatattataaaaaaaaaaaaaaaaacatcggaagacaaaatagctaaggattaatacaaatcaagctcagctaaataacacattgggttcaatcttttctcgggggcgacagacaaaccatgcataacccaacagcatcatgatgatgatgatcaatgcaacgcccacgattgcgataaccttgatgacttcataggccatattgttttacaacacacacgaaaaacttcttctttctgccaaaatttctctcgtcttctttttcataggccatttacatatatgtaaacatccgtaaaaattttaagttttacattttgttaaattaactagaaaaaattagaacttttacatttattcattaaggaacgttaactaggaaaaagagaaattttacatttattggtacttgttgatcgtcataaaggtttatgcaagtaaatttttttacacacgctaggtaaagttaaaactatcaccaaagcttagtaatatttgacccagcaacaagtgaaagctaacatattttttctttggatcaaagccaggatggtgttggatccgattcggttcggttttcggataaacgaaacagaatccaacacagaactattcggttcggtttcgatacggatggtgttggattcagatcggttttcggggaaacaaaaaaaactaaaacgttgtccaattttaataaaaatttgtttaattttattaaaatttggttaaattttgcaagaccatgatgaacatttttgagtctctctgttcaaacacattaatgtggaattttctttgctatgtagcatataagttgtgacattctctaagattctctctaagaacggtgttaaatttaagagaagccgtgttgtcaaggcagtgatctcaaaacacataaaagatttctcaaaaagattctgaggtttctaaagaacttcaaagagagaggaagagatcatcattctacagattcttcgttgtgatcaaagtctatatccttcttttagcagcgacctgacgtccattgactccagcacctcctcgacctcgactatgaagaatctacggtgaacttctctgagtagttttaaaacattcgccaatccaccgtcattttcaccctcgtctgttttcttctcagagtaagaatttgagtctaggccactgcgtctgaaatacttgtacttgcgaatctgtattaggttattcttgtgatggggccaaatatcacgcgtatcatcaacaatcaccactccacgctcctcagccaaaaccaaattaagcgttttcatacgaggactctcgtcttttgtaatcactctattaccaaaatagagtttcttcggatcaatcatctccaagatggctttagcatatatgcgactacccattgtgtaaacaaacatcgtgaacatctcgttggcttctttcaagaagtcacgaacaaaaggtcgtagctttatcaagcgatcaatgggatgtcctatgggtctgaatttccatagatcttcccttgttcttgaactcgcttcttggattagatacctctctgcttgggagagatttgaaactagtttagagtgcagaagtgtgtggtctaagtcaaggacaaggtggagtttcttctcgttgagacaagagtgttttgttgtaagggacttggttaatgccacagcttcgttgcttagctgtaaacctttgaaaatataatcaaattttcggaattggcttttgtgcacttttgatttgcagccgatgcagattccttgaaaaacgtaccagtgaccacaacaactactagaagtggttaccaacatgatttttgttttctgatcgagagaaaaccctagttttatcagaaaccctagtttgacaaaagagagagagaatcgttactagttctgtatttatatatatactagattttaataccgcgggactatttgttttagaaaaaaaaaaaactgaaaaataatttgtttataaattatttatatgtaacatactgttttgtattttataaatatacaatcctaatttctatatattgtacaatcccttgattttatcatataatacaccgtaagtcgatttttaaaatttaaaatttaaaattatatttttttttgttaagatggtttgttttgttatatattttaaattatataactgtattttaattgttagttgtatgatttcacccgtggtaaaccatctcgttttagtatcaaccatactcttcctattatataactccgtctcgtgaaattaaacattattttgttattttctttttaataatatttttatttaaagacattgaatatatttcttcttaaatatttttaattactatattagttcttcttaacatattcttaaaatgatcaagaactactaagaacatcccaactgtaatacataatttgaaaaataaaataaaagtaatatcaaaaaactaaaaagataaaataaatcatattgatatttttcgtgacgatgttatgaatattcatgttatgcaaaaaaaaatatacaaaataaatcgtattggtatttaaaaaaaaaatcccacactgcttttcagtttaaatcttctgtcaccattgttgtcatcttcctctctcgtgaatattttttcttttcaaacgttgcttctctttctaaaagaaaagagacacgaatccaatctaaagtaagacgtttgtgatatatatttggtgatgggaaatgaggtttacgtgtatagtatttataagaaagctagatatgtttcgttaattcatagcaaccgatcgaaaaaatataatcatgcaagattttagggagcaaattattttaattagtttgtgattggaatatgctaggatcatcctgtattcgagtatttaatttattttcataatttgttttttacagatattgaaggaaaaaattataataaaatgttgttagcatagatcatgttttaaattctaaacccgttgtagtattccggaaaaaatctttaaataaaaaatattttttgttagcatagatcctgttataaattcttgaattggatttgattttgggaattttgattaagatcaaatattttatttgaagtttttttagaaacaaacattttcgaagttgttttaaaatgttgtgaatgattatgtgtagctaattttaaggaatttgatttgaagtttgttgtttggattaaatttgaatgataatgtgattgatattttaaatcaagaattaaaaatcaaatcaaataatttagaggaaaagatttaatgccaatgacatgtcattgtaaataaatgccaaatacaagatttatttactagaataactgcaaaaatgtatatgtagatatggattcttaatccgaccgacttctttctagccatttacaattttgcctacttgctacgtttcctttttttgggaactctttgttaatcttatgctaatcgactacaattttagttgtagctaagtgtagaaataggagatgttttattttagtcgattgccgatattgataggttctgtgagtttatctccgtatatgatgaatcttccgatccttcaatttaagagaacatcgttgaaacagtagagaagaatccagtggtagttgaaaatggagaaactggttcttggaagagttaatcagctatatcagatacttgatcggcatggttacaccacgtccggtgtcaccaccgttactccaccctaacgtgtacgtgtggtagccgtttccatcacttgagagacagatctcgttctttccccaggacacatgtatagtacattcttctcgacagattggtcatcatccacaataatcatcattatataaaccgatttatgtcgaatgatttaaagttacatttactctgcatactcgtatgagttgaaacgagacagagaaacacaacacaaggctcaagttttcagatagccacacaagtcattacccgaaacagagagtgtgaaaaactgaatcctacctactactcacccaccgccatgaatgggattcccctgccaacaacaaccagtaccatgatttttagataaagtccattgtctcattgttgtagttaatgagaaactgaataagccaaaatttcatacaatgatacaagagcgatcgttattaggaaaacttaccagccaccatgtcttgaaaagtaatcattatctagtgaaatcgcaagcgtaaggacaacagctctttctgacaaagtcaatggccgtttcacttctaactcttctacctgtcatgagttgcataagaaaagctcgatcaaatgtctaatgttaaagtaaacaaccaaaattacaagtacaagagtccacggcacaggagtaaacccaccagtgtcgcagggccggtcttggctgcagcatcagcttttccaaatcggatcacgtactgcccagcatctgtgaatatctgtatcacatatataaggagacattcagatttttatatttacgatgtgtcttctagtctaacatagattgcactgaaaatatttcaaaatcttcaaggcttattggttgccacaatcaactatgtattcatttttcctgtaagagattcttcatttggctgatctttaagtatataacatttagttagagaaaacaaacctcaaagccaaaacctctccaatcacgatctatttgggctaagacttccccatcagcatccttcactgtaaatgtccaattccaaaacccaggattttctaccactgcaaactggttgttcctgcaagcatcaaatgtcagaaattttgttcgtccaaagatgttgatagattaacgaagagcataacacgtgttgattctttgtacataaaagacgtgctctgtaactgtaagtctatgtcattcttaatagttataccagacaaacatacacggtcttttgatcccaaataacaaagaaaaggatatctaataggtcaatgaagcattcaagaaagccaattaaaaaaagatgcttagaaataaagtttaccccaggtataaatcataaattcttctccatagatgccatcgtcgatgaacaacaccaatttcctacaccagtaccagacatgacaatgagctgaaattaaacagttaacattggagtacagtttaaaggcttgaaatcctacgcaagtgtacctctccatcaatttcagcatatattgaacttgtgagccaccagaaaggtcgacgaacctaaacgatgtagaggaattatttcagctccaaagaaattcaacaattctcttgccggaaactttcaaacaacagaatgtaagaaaacctcacccggaaaagctcattacccaaagcatcagttatggaagcaacaaatgggcgccgggtacgaagcagctgcaaatatatttaatatcacatgtgaatggtttttatcatttaagtcgacacatatgaaaatcactgccaacacaatatgtatctgaatacaatctcggaggtagaacagaatcagatctattctaagttcatggggataactgatagaggcgacacaagctttgagtgagtaatgttacatttactattatgaagactcaagaacatggtttttaagcaaacctatcattgcttgcttaaagttgcaatatcagcgcacttcgtccaaacataaaaaataggaaacaaaagactagataaggaaaacgaaatagcacatgcaactgaggaaaaatagatagctagcaacaggaatttcaatgaggaaaaaaatcacagtatgcaccttcctgagagaaagatgttcaaacaacaaatcaaaaatttctactggagaatctaacgcgtgaaaagaagtgaagcctcaacaatcaaagttgaacctagacaatcaattattcaaagaaagttcaagccttcccattcatatgctcatataaggaaaaaaaaaaagtgcagacatgctaaccaagtatactcataactagttaggaatagcaatgaattgtgttgtaacacgtcaaaacttaaaaacactgctcattggtgacagccaatttaaagtattaacacataatgatattagttgaggtatggagaaagaaaatttcagagtgagaatgtaacctgccgcgccagtaaattgctttgttctcggatagaccccacaggctgtcaagaaagtgagaaaaaagaggtttgaaattcgcaaaattttatatgaactcaaggtcttatgtaatagtagtgccctccacaatcaaaacttccgtaaacgaaagcctagaatctatgcgttgagatagcacttactgcctcaggatagcaaacatctactacaatatagcgattttcctgcagaaacaaaagtagattacaagagtggtatatcagatatatgtggagaggaaggagatgaaacggtaggaattaacgggacatttgatatgtaaaagttacaaacatggtatgattagttcatcagaaacaagtaacaacggtattacatagccaaatgaggaacatgagaattggcagaaaaaatacctgttcaaaaccaagaaccagatttgcccattcaatatctcttgtaaccagcaaattcgatcgtgcaagcagagttgcaattttggcctaaaaagaaagtgaataagattatgatttccaactcctacatttcaagatatgcaaggataacaagagtacaatgagctaaatttccaacctaataaacaaaaacagaaactaaaaagtaacaaaatttatcttctgtagtaagtttcccatacttggttccatctagttaacagaaaaacattgtattgttcagttttagactacactaatgtcacagaattaaatggtacctaaccaagttacaagaacaattcatacaaatatgatttagtagccaaaggaaagataatgagtcacctcatcagaagttttaggcttcagaagaccagacatagactggctaaccggtggttgctccactgtaggctcaacagtttcaaaatggacatcaaatccatcattttcagtgtagttcctatgcttagaagctttcttatatcgcttttccatagcctttagctttttcttatctgcaacccatagctgagccaaaaacttccgatccaagctaggaggagaagtatcactaccactgcagaaacatcgaaacacagaacctgagacttgtcctcctcgtccaaaaaagcttccttgagaactacatagctgactatttctccataacactgcattcccagctcgcgagtgtaacttcttaatcccaccgtcctgtgtaaatcaccacaccatcactaattccaattcaacaacaagaagccctaatcctaatcaatctctatctgatgaaaacaaattcgaatcttctatccatggcattacaagagaagtgattgttgaatcaattcgaatgagaaattataaatttcgagtgcgagagaacacgtaccgcgtcggagaagagagaggaacaagagacagctgctgctgtaagatcgccgcggagattgaaaccggatcggagaagagaagagagtgagcgtctagagaggtagatcatgattcgcaactttgtagaaacgtcggaagtttttttttttaccgatcaattcgccggcggctataaataatgatgagcaaaacggtcgctttgtttcccctgtgggagccgaagttttacaatttggaagttctaaagtgcaatttcgtaattacgtgaatatgttaggcaatgtttacaattaaattttgtagttacaaactatcttaggcaatttgaaagttatcggaaaaatggtcaaaatcaacataaaatgtgaaggctcacctcttatgccactattcgaaaataaaaaattagtagtaccactcttatgtttgagttccagtcaagaatgcacctgaaccagaaatttgaatttggagtgccattttttaatctgtatgctattctatatgtgttattcttatttcaccattaatgaatgactttttatttaattttaaaaaataaaataaaaaaataagaaaaacataaatattctgtatatggaccctacaaaaacgctggatttaatttagtggttatatttactcaacatgtgaaccccactaaaaaatattttgtctttttgcggcagaaaatactcatagttgtactgttgtaccatcgtgttcatagttgaacttttcacagttttcataatttacagttgaactagacggtaaataattaattataagttgaactcacactttgtctctattattttgcatttccaaagttttcataatattacatcggtaaaagcttagttttcacctattttacttcatataaggtgatcatatactaaatgttccttgtattagaaggggtgtattatatgaaaacaacattgttttttagaaaatattaaattttattgcattgatataaaattatttatttatagctttagatattcgtatataattttacgtgtataataaattatcaatttaaaaaatttaaacattttagcgttactaaatcgaactagttgaactaattatattaaatgttactacgaaaaccaaagaatagacatttgaactagttcaactaattaaattaaaaattatcacggaaacaaatacatacatgtttttaatctaatccaataagttgaaccaagttaaactagttgaattgttcatataaatccgagaaatataaattcaaaacacacaaattaatttttgaataattcactctaatgcccttttctcaatgcccttttgcaactctacccttttttgccattttcatttctaccctttctaatacttttctccccaaattacccttaatgagctacccacagacctaattcatttcttcactctctctcttcttcttccatcggaaattgtgaatgtcgttgaatcccatgccgtcggaaatagtgagtttactcgccgtgaaaacccatcttcgccgtcgtaagtagagctgtgtgtcgccgtcgaatctcttacgtttcccaggtttgattttataatgttagcttaaatcttcgttttcgaattggtttattcgatttttgttgttgattatgtgaattcgttatttgaatcctgattcaatcgacagtttgacatttgcttcagcttcgaatttgaattttgtttgagatttgatgattgaatttgtttctaaaatccttgtacattcgttatactgttctaaaatccttttgaattcgttatactgtttcgtgatagatttgcttatgtgaattcgttatactatttcgtaatagattttgattctgatttagtgtttacctcttttgcatatgctttcgtgatagatctatgccacttacgctttaaaacgatttgtaaaccatgttaaccacttttcaaagcttttaaaatcccttgtaaattattctatgctacttacttacgctttaaaacgatttgtaaaccatgttaaccacttttcaaagcttttaaaatcccttgtaaattattctatgctacttacttactctttaaaacgatttgtaaaccatgttaaccacttttcaaagcttttaaaatcccttgtaaattattctatgctacttacttactctttaaaacgatttgtaaacctttcttctctttgtagtgacagtgtttttgtggctgttgattttgttgttatttatcttatcaggttataatgctagaattgtattctgtttgtgccttgtggaagttgacaaacaatatgacttgggaatttgaattagacattgaattaggagcttctttagtgctcattgatgagcacattacctatcacgcgttggttgatattcttgtagaggattttcaaatagatagttcaaccaattctttgaagcttagttacaagttagtctccacgtctacaaccatacaatctcatcctctttatattaggaacgatagactgcttgcaacttttatgcacaaattctcacagagtggaggattgcttcagttatgtttgactgtagagcaaatttctgtgacagttgagcaggtttttcaataaccttcttgtgttataattttaaaaatccttgtaaaatcattattaagtcagtgattgtgcttattacaggctgagcctacttcaaatccttttgtttctcattctatccctaatgctcaggtactaatcgttttaaaaatccttgtaaaatcattattaacgtttttaaaccccttttaaaaatccttgtaaaatcattattaacgtttttaaaccccttttaaaaatccttgtaaaatcattattaagtcagtgattgagtttattacaggctgagacgacttcatatccttttgcttctcattctgcatctactactcaggtaataatccttttaaaaaatcttgtaaaatcattattaacgtttttaaaccccttttaaaaatccttgtaaaatcattatttaagaaagattgatgtttgaggtaagctttttattttggcagccgaggttaacctctaggattattgaggcgtgtgtatctgaaacatctagtattcttgatcaacagtattctagttctgcgttttcaactggtctaagtgatgctgattctttgtttattggaaaatttttcaaagacaaagatgaaatggtattcacgttgcggatgtctgcagtgaagcacagctttgagtttcatacagtgaaatcagatctcacgaagtatgttcttcattgtattgatgaaaactgtagttggagactacgtgcaactagggctggtggatccgagagttatgttattcggaagtatgttagtcatcacagttgtgactcttcattaaggaatgttagtcatcgtcaagcatctgcaaggacattaggaagattgataagtaaccattttgaaggaggaaaacttcccctcagacctaaacagctgatagaaatatttagaaaagatcatggagttggaatcaattattcgaaggcttggagagttcaagaacatgcagcagaacttgcgaggggtttacctgatgatagttttgaggttttaccgaggtggttccacagggtacaagtgacgaatccaggttctatcacttttttcaaaaaagattctgctaataagtttaagtatgcgtttctggcttttggtgcatcaattagaggttataagttgatgaaaaaagtcatatctattgatggtgcccatctgatatcaaagtttaaagggactttgcttggtgcctcagctcaggatgggaattttaatttgtatcctattgcttttgcaatagttgactctgaaaatgacgcgtcatgggactggtttttgaagtgtttgctgaatataatccctgatgagaatgatttagtttttgtgtctgatcgagctgcttctattgcaagcggactttcagggaattatccacttgctcataatggactttgcacttttcatttgcaaaaaaacttggaaacccatttcagaggttcttcacttattccagtttactatgcggcttctagagtttacacgaagacagaatttgattctttgttctgggaaatcactaatagtgataaaaagttagcacaatatctttgggaggtagatgttaggaaatggtctcgagcttattctccttcaaatcggtacaacatcatgacatctaatctagctgaatctgttaatgccttgttgaaacagaaccgcgagtatccgattgtttgcctatttgagtcaatcagatctattatgacaagatggtttaatgagcgacgtgaagagagtagtcaacatccgtctgctgttactataaatgtagggaagaaaatgaaagcgtcatatgatacttcaacacgatggcttgaggtttgtcaagttaatcaagaagagtttgaggtaaaaggagataccaaaacgcatttggttaatctagacaaaaggacttgcacatgttgtatgtttgatattgataaatttccttgcgcacatggaattgcttctgctaaacatatcaatctgaacgaaaacatgtttgttgatgagtttcattctacttacaagttttatctctattcttcacaactttacaggcatttttaaatgttttaatatctctttttatggttttatctgtgtttatgtggttttaatctcagtttacatcgctgtaatttataggtggcgtcaagcatattcaaagagcattcacccaaatggtgatatggaatattgggagattccagaaactattagtgaagttatttgtctcccaccttctactcgtgtacctagtggcagacggaagaaaaagaggataccttctgtttgggagcatggacggtctcagccaaaaccaaaattacacaaatgcagtaggtgtggtcagtcgggtcacaacaattcaacttgtgttgctgcaatttagatatatctttatctccaaagaattgaatattgttgggttttttaatattttcttcattgtgtcgtgtcattactctcgtttgttaaaattactatcaaacttttacaagtaattttgaaggttattccaatattttaccttttaaaatctcttgtaagatcctgtttaaaacgtctgtttaaatccttttaaaataccttgtaaatctttcgttatgccacttacatatactttaaacgattgtaaatcaagttaaacacttttacaagcttttaacttgaatcttttaaaatgtcttgtaagtcgtttactaaaattactatcaaactttacaagtaattttaatagtaattccaataatttacctttttaacatattttgtaaaagcctgtttaaaatgtctttgaaaatccttttaaaataccttgtaaatatttcgttatgccacttacatatacttttaacaattgtaaatcaagttaaacacttttacaagcttttaaaatctcttataaatcagtttctgacattaacttattcttcttaaacgattgttaatcaagtaaaccccttttaaaagcttttaaaatcccttgtaaatcatgctttaccactttattatccttaaaaaccgatagcaaaccatgtaagctgtttatgcctttaaaatcacttgtaaatcatgacaattcttataaaaccataaacagttgacaatagtaaagcattttgattagatttgacagtcataattaaaatacaagtacaatcatagattccaaataacaaaagtaaaataaacatgtttgaaataagtcagtctaaataactaaatccatttttgccttagtagctctgtccttctctacctgcaaataaaattcaacctgtaagttattttttgcataacaataatattcaagtttttaaagatatatcgttatacaaaagaagagtttaacactaaccattattatcttgcagatttgttcagctaggtatttcacttctggatgagctcgaggcagtttgtcaggatgaatgagtaacgttgctttctttaatgctaatttgtatttcttctcgtcccacatttcccaaatttcgactttttgccatttactgtcgggccaaagaatctgaaatgtaaaaattccagaatgattagaattaaaatcttttgcagcaaaacaatgatgtaatttaacttactttttcaagtgacgatagtagatctcttattaatttgtttttcgcccattttttaacttttacgccaatttcttccattacttcctgactcaacatgaccggcgtcaaaggagtttgaactgatacaaaaaaaaaaaaaaaaaaaatatttagaagttgtttatcaaggcaaatcatctgtgaatgtaaaaagaacttacgactgctctgtccctgggggatttcttcttcttgcgtagagagtggtgtttgattaacatcttcatcatctttcttggtctctcttggaacctgtaaacaaaaacatcaaaacaaatttttattttttgacaattttatcatgtctttttaaacaattaaggaatgcagacctctgttgtttcttctttttgaggttgtgattctttctcggtgggtgcagtcccattatcttcatcatctgacaaaattacatatgcttcttgatcttcagtctcatcatgttcatcatgttcttctacgttttcttcttttggaacctgtaaaccaaaacatcaaaacaaatttttattttttgacaattttatcatgtctttttaaacaattaaggaatgcaaacctctgttgtttcttctttttgaggttgtgattctttctctgtgggtgtagtcccattatcttcatcatctgacaaaattacatatgcttcttgatcttcagtctcatcatgttcatcatgttcttctacgctttcttcttttaaaacctataaaccaaaacatcaaaacaaaatttttattttttgacaattttatcatgtctttttaaaaagttaaggaaagcagacatttgtttcttttttttttttttgtgattctttctctatgggtgcagtatcattattttcatcatctgacaaatttatatacgcttcttgatctgcaacatcattatattcatcatgttcttctactttttcttcttttccttcttctctttccatttcttcatcgccttgtttgggattctctttttttttctgtttcttcaacattgcaagtagaatgatgatctctgtattcaacctgtataaataattacaagttcccaaatacaagccaggacacagttattagtcatgtaaatcacttttaaaaagcttttaaaatccgttgtaaaatcttatcgaacactgcctaccctttaaaaacgaatttcaatcttttaaaaccccattaagaagtctttaaaatcccttataaatacatatctaacactgcctatctttttaaaacggttaaaaatctttaaaacacgatttataagcttttaaaatcccttgtaaaaacacataccttttcttcttcctcttcttttccttcttcctcttgcttttcttcttccccttccatttcttcatcgccttgtttggggatttcttgtttttctgtcccttcatcgcctctgtattcaacctgtatataaaattacaagttttataactacaagttactcatgtaaatcactttttaaaaagcttttaaaatccgttgtaaatacttatcgaacactgcctatcctttaaaacgaatttaaatctttaaaacccccattaagatgtctttaaaatcccttgtaaaaacacataccttttcttcttcctcttcttttccttcttcctcttgcttttcttcttccccttccatttcttcatcgccttgtttggggatttcttgtttttctgtcccttcgtcgcctctgtattcaacctgtatatgaaattataagttttataactacaagttactcatgtaaatcactttttaaaaagcttttaaaatccgttgtaaatacttatcgaacactgcctatcctttaaaccgaatttaaatctttaaaaccccattaagatgtctttaaaatcccttgtaaaaacacatatcttttcttcttcctcttcttttccttcttcctcttgcttttcttcttccccttccatttcttcattgccttgtttggggatttcttgtttttctgtcccttcgtcgcctctgtattcaacctgtatataaaattacaagttttataactacaagttactcatgtaaatcacttttaaaaagcttttaaagtccgttgtaaaatcttatcgaacactgcctatcctttaaaaacaaatttcaatcttttaaaaccccattaagaagtctttaaaatcccttgtaaatacatatctaacactgcctatcttttaaaaacggctaaaaatctttaaaacacgatttataagcttttaaaatcccttgtaaaaacacataccttttctaattcctcttcttttccttcttcctcttgcttttcttcttcctgctcctttttttcgtcctcttctttttgttcttctctagtataactggcaggaactctttcgatgcctaaatagccctccagccttccaactttcttcttaagaacctcccaattttcatataccagttttaccttctcaccaaaggacattgatttcctttttctgctttgatgcacaactgtttcaattgcaggtttcaagacatgatcaattcttccttgatgtccttgttccacttgaatccatctctgacaccaatccttcttgctcattctatatcctttgatcacaagatcaaaaacatccaacagatccttgtcttcaggattcttctgtgaaaccaagtggtcgtattcatgagtatgaacaccaactattggtgtcacttcaacctgcaaagataaacaaaattccaaactgtgtaaaaataatgcacaattcttaattaaccttttaaaatccgttgtaaatagtttaaattgcttttaaccctttgtaaatctttaaaacttgattgtaaaaactattgtaaaacatactctttatttataaacagtgtttaaaacataaaaaaaaaaagccacagctaagaaaatgtaccttgtcaccatctgctatcattgttatagcttttgcactaggagacgatgttgatctccattggagaattaatggaatatttccactagatgattcatctctagtgccaaacttttctcccaacttctgaaccgatgataatgcccatatctgaattgattgaacaaatccaaatagaccatattgtttccttaacaaatagtcattaccgattctcttcacttcagttaccaaatatgagtacacaatctgcgcccatggatacttacagaacttttcgaaatcagtagctctcttcagattctcaattggcagcatggtagtcggattttgagctagcaatatgccctccactagtaacgaacccgccaatctcagtctctcctctggctgcatctttttagaacgcttttccaaaacatatgtaagatctaaaaaagtcatttctttgttaatccacacatcttttttctgctttcccttcaaagtctgattatcttttatccaccacttttctttcttctttctcttcacatttggactgcttcctgattcatcatccattggaagtcctgttgttatgataaactctctcagggagaatcgcataggttgatcagcaaatacaaaccgcaattcgtcattgttggttagtattcttctctggagtaaatgatgaacgatatggcttaaaaatgctaagtccatttcagcgaattccactataggacccaagaatgtgtccattaatgtgttgaactctatcggttctaaagctttcctgacagtcgagacaattttgaaggatgaatgctttgatacccttgtaatattatctacttcgctgtctggttggaacagtcttttagggaagaacagtttctttgtactcatatttctcaaaacctgattaaatacattaacacagtcattaaattaacacagttttgaaatggttttaaaaaccatttttgaaaatctattatgcatttgtagtttttgaaacataaacatagtcattacaagtcgtttaaagaactttaaaaacccttgtaaaaccatttttcaaagtcattacaagtcgttttaagactttaaaaacccttgtaaaacacagtcattactccataatcctttttaaagaccgttttgaaaccattccaaaaacaaaattttaatccttttcaaagaacatagccgctgaaaatagaaaaaaaaaaaccttttccaaaccaactccaatcaactggtaacccataaattaagtgaggatctataaattaaaacacaaacccaaacatcaatctatttactgttgaagtttccaaacgaaaaaactttgaaattgctacaacagagaagttaatcggcatttgaaatcttctttgaaggtttttgaaacccaaacatcaaactttaaaacataaatctatcaaaattatataacaacttccaacactccttcaaaatcccaaatatcaatctattttacttgtttcgttttcaaccgaaaaacctagaaatgctagaacaaaaaagagattcggcaaaaatcgaataaacccaaatgttaaacttcagtttcgtaaattagttaccttcaattgcttcctttttgctggataatcagattttcttcagattgttgaaaggaagaagacgaagacgacagtttgtatttttttatatttttttttcttggttacgtttttgttgtcttttcacggttcccttccttttttgtttttgggttatagtgaatttttgggctttagtgttttttgggcttttagtgtttttttactaaaacagtttgtttttctaaataacaggcctaggcccaattagtaatagatacagtgtttaacattactgtaactttttcaacggttgatattctcttttaaaaacggttgtaaatcattttaaaaacggttgtagatcttttcaaagtgactgaccctaattcggtgaagatgtcagcagccaatccctgtttaatttgtttttaggttatagtgaatttttgggctttagtgtttttggggcttttagttttttttaaactaaaacagtttgtttttctaaataacaggcctaggcccaactagtaacaaatacagtgtttaacattactgtaactttttcaacggttgaaattttcttttaaaaacggttgtaaatcattttaaaaacggttgtaaatcttttcataataacagttactgcagctttttcaacacttttaaaacgcttttaaaacagcttataaatcgtttgtaaatctcttttaaaaacggttgtaaatcattttaaaaacgattgtaaatttttttcataataaccgctactgcagctttttcaacacttttaaaatccttataaagcagcttgtaaatcgtttaaaaaccctgtttaaaagcatgtttaaagtccttttccattcaaatcaaagcacctgttaacccaaacaaccattatacagtaattttgtaaaacaggagttgaactaaataaacttcataaatcttgttccatacagatgttcatgaaatattcaaatgacaaagttttatgaaatcagaaacaaaagctgataaatctatcttatactccactactttttgattagaagtctgctacttctacaaagtgactgaccctaattcggtgaagatgtcagcagccaatttattcctaacgttttgaattatgttcccttcaaggtttgaatggctggtatacattgagtagcattccataaacttcagcatatagataccagactcttcatttctaggagcctacaaccaaaaaccaaaagaattacttaagcaaagaagttatagaagtcaggacttacggaatattcatttctaagactatgatatatgaaaagtggtcaggactttgatgctaaatggagagacatccatgtctttttttttgaggatgttccaaacaatgtatggcataactatagagtaggcaacaattatattttttcttgacttcttctgttaaataagaagctgcacattcccatatacaaactgtcttctgttctaagtggatgagcaaggcaacccagcattttcctttgatacagaaaggagccaatatgcacttggtttcttcctctattatcagcttactgatttcttcagactgaaactgaaatccctctttgttatccaaaaactccatgtatgactcatcaatcacatttaagaaagacgatccaacaaatacaactgatttgtttttgaataattctggattgctttccttcctcgttttcatcaactccaaagctgcatcaacatgctaaacacaacaaaaataaaaattatcatattagaaaacccctttaaaaacgattgtaaaaaatgcaaaccctttttaaaataccttgtaaatcattctacgccacatacttatgctttttaacgattgtaaatcaagttaaacacttttaaaagcttttaaaatcccttgtaaatcattctatgccactaagttctgcttctaaaacgattgttaatcaattaaaccctttttaatagcttttaaaatcccttgtaaatcattctaatccgttaaaaacgattgcaagtcatgtaaatcctttttaaaataccttgtaaatcattctttaccactttctaatcttttaaaattgtttataaaccatgtaaccctttttaaaatccctttcgtaaataacttaatgatgctttaaaaactatatgtaattcatgggttaccaattttacaaggatttttggacataccgttgttgttattgctttccctggcgtctctagggttgtaaaccactttgtatctacaatatttcccgcgattgatagtggcctacaacaacaaaacagtcaacaatgatgcttcttccattattaaaaaaaactcactatcttactaacaaaactcacttgtttttccttgacttcttctattcagccaatttctcaagtcttgtggcatcaactttcgcaaatggatgcaaaattggatgcttcttcttctcagctgtgaaaggtgcttgggtatgaatggaaggaaccgtaccccgcttactctttctttgcggagcgggctgaaaatcatcattgtcgccatcattatcagcgttatcaccatcattgccaataattttccttttcttactctgtgcctatcaaaaagaataaaaaaaacagatgtttaaaataccttgtaaacaaaattttcaaaatcataataaattagatactaacctctttccttgttggaacatcaacatcagcactatcaacttgtttctgcctctttctcggcacctagaatagtaaaaaacaccaattaaaagtacttttaaaatcccttgtaaatatcataacaagacaattgacaaattttaaaaacagtactgttgcaaatactaacctgttttcttgttttaagattatcctcagcatgaacacttggtttaactctcttgttctgaagttgcatgaaagataaacttttaaagatttgaaaaaaatattataaacacttggttagataatacagtttttttttaaatgctaacctcatttcttcctttgctaactctcttcttatccttttgaacatccagactttcttcagacaaaatattgaaatttggtgtagaggatcgtggagtaggagacttatccttgaaaagataacagaatgtaaaattataaaaaggatactaatcatttttgtaagacttttagagatataaattactgtacttttgatgattcttcagctacttcatcaccaacatcacgttgggtgttttcatcatcacccggatagctcccatactgtgtgtttggctctcggattgaatcttcaaatgattcattgtcattctgcaacaaaataaaaccaataagtcaatcattaatataattagtagacctttaaaatagcttgtaaagattttcaattacctctgcttttctttctagtcctccttcttcttcagcctgcgaaaaaaaagagtacattgtaaaggtttactacgtatttttaacctttaaaatacattgtaaaacctttcctttcaaatagcttttaaagaaacatttacaattacctctggttgtctttatactccttcatcttcttgttttctttcttcatcttcctcagatctctgattattcttttcctccattctaatgtccaaaatcctctcaatcagctcgactctcttgtgaagatcttcaaggattgtcaaaatcctgtcaagcttctcgctatcagatattttgttattgattttgttttgacctacttcttcaagggcagcacaaacatcaacgcatcttgtattccattcagttttcttcaatctgtaccccatattaacaagtcccaaaatatgttggaattctgtgtcgtctgtgtggaaatcaggaactaaagacttgaattcttctgggtttccaataattgtattcacctccatctgcgaagatacaataacattacaaatcttgagaaagcagaacttcaaatctaaaaaccatttaaagaattctgtaaatagacaaaagcttacctctgaaacatcatttacaaggtttacgatcttgaaaaactctggagtagtagtgcttttccacttcaatatcaatggatattcagattggaattccttatctttaactccatatgctgcaccaaatgctggaactgcgctcaacacccatattgttagcgctagtccaaatcctctcaaaccatattgaatttgatagaacacttaatgcttctttaccccacggttgggctgtgtacatctcaaaatcagaagcatgctgcaatcttggcaaaggtatcttctcttttccatatggtgtcaaaagaattccttcagtcaacactactgcagcaagacacaacttttcttcatcttcaacagcaggttcaccttccttaggttttaaaaacaatcgatcttcgagatcaccaagagtctaggatcctttactagcccaaaagtatggttcttttacaggatctttcccctttcgtcgaagttccctatgaacaggttcacattgaattcctgtatgaacaaaagacagtgtagagactattattacaggttttatagtaaatactttaaaaacgattgtaaatcatgtttaacacttttaaaagcttttaaaagcttttaaaatcccttataaatcattcaatgccacttacttatgctttaaaaacgattgtaaaccatgcagacacttttaaaatcccttgtaaatcattatatgacacttacttatgctttaaaaacgattgtaaatcatgtttaacccttctaaaagcttttaaaatcccttgtaaatcattctattcaacttacttatgcttaaaaaacgattgctaatcatgtttaacccttagaaaaggttttaaaatcccttgtaaatattctatgccacttacttatgttttaaaatcgattgtaaactatgcaaacacttctaaaatcccttgtaaatcgttttaagacacttacttatgcttttaaaatcccttgtaaacgtgtttaacacttctttaagcttttaaaatcccttgtaaattattctatgctagttacttatgcctaaaaacggttgtaaaccatgcataccctttttaaaatcccttgtaaatcattctctgccactaacttatgcttcttaaacgattgttaatgaagtaaaccccttttaaaagcttttaaaatcccttgtaaattatctatgatacttatgttttaaaaacgattgtaaactacgcaaacagttatgcaaatgccttgtaaatcattctacgacagttaattaagctttaaaaacgattgtaaaactttattacctgttgtgagatagaactctctcaaggagaaacggataggttgagaatcaactctaaaccaaagagttgatccttttgttttcactctctgctgcatgagataatgtaagatttttccagaaaatctgattcccttcttagccttcatttttggttccaattcaactaaaggaccaagaaacgaacttctaatcttctgaaataaacactcgcctaaagcttcctctactttactaactaaattccaatccgagtattgttgaacggttcccagtgcaatagattcctcaccttctctgtagatttgttcaggcaatgtaaggatttcactctctgaatccatctgcaaaacatgttatgaaacagcgtcagatctactataaaatcgactataaaatcgactataaaatcgactataaaatcgattataaaaacggttaccgtcggatctatcgatatctctggggattgtttgcgtcgtagagaaatgatctgaatccttcagcgaagaacaggtttatcggagaggaaattcgtcggcgattttggggtttctcagaaagaaaattcgtcggcgattttgagtgaaatcggagaggaaattcgttggcgattttgagtgaaattggagaggaaattcgtcggcgattttgagtgaaatcggagaggaaaatcggagaggaaaacgaagaagtttgtgccaaaacgaagaagtttgtgaaacgaacgtgaaacctaatcattcagagggtaagacagtcatttggcatataagaaggggtagttttaaaaatggccttcaggaaagggcatttttacaaaaggttattagaataagggcagttttgtaaatctcccttaattttttcatgtgcaacaaattctacaagtgtatcccagacatagccttgttcttcctcttgcgacgtttttctctggttgatggaaaccatgtttttttttgttttttcaccattttttgtgtataaattcaattggctctgtcgactctggaaaaaccatctctggccggctcatccatttcggtagccgtcgattctccggtgctgcgtcatcctccgttgatattgttggatcgaaatctagatcgatatctcaatatttacttcgcccactctggaaatgttcctcttttagagatatcatctccggtcgactcatatatttcaccggtcgccttttcctccgtcgcagcgtcttcttttttttacaagcgccttgtttgttctactatatctataggtctcgattgaagaaagtaagtgaacgaaacgaaaagggttgtttagatatttgcaatgatagtcagtacaatgtagtaattgaatcgtgttgctccccaaatcaatccatagttgcaaaacaaaatggtacaactgaaattggttcaattgatctagttcaaatggttcaactcatctagttcaaatagttcaactgatctagttcatctggttcaatcggacgagttcaactgatatagttcaaatggtttaagtgaatgagttccaatctatttttccggcgtatgccacaaaaacatcagttttattgagtaaatttgaaaaatgctttctttatgagttttatttgaaaaatactctatcctattttttcttttaaaaattaatttttaatatataaaattaataaaataactttattataatttaatataattaaaactttaaacagaaaaaatccataaattaatatttgatttaacagtaatttaaaagataattcttatcttaaatattttaaacaaaattttgtccaaaatattatatatatatatatatatatataaattttattaagtgataaaattcgaaatatatttaaatattaaattgttaaattttaatataaatgataaaaaaaactatatttatttcaaaaatagttgaaaattttatcaacaaccaaaacatattttgaataatacatacattttgaatttctcaatagccaaattctttttggaatctactacttatatttcaaagttacttaattttaatttgttttcttctaaattttgaattctgtttttcttatttattaagaatacaacatttaaatttagataaaactgttattttacatattaaaattgtaatgttatttatattttgggccaggttatttgttttattgggcttgggtcggattattttggttggatctgtagtttttaaatttttgaaaggttatttggacatttacacctgttttgattaaaaaaaagaaaagataaataaaattataaggaatgggtggcattgctgatcattatttcggagaaagtggcattcctgccatttattctcttatgtttggatttatattattgattttttttaaatcgaaaaacgagtaaaggacgaaaaatccaaggcaaaccactgaaactacaataaaacttaatttattagggttggacccaatacaaaacgtaaatattcgggccagttgtattatttaccctagaaaaacctaagtaaaaaactaacttttcaacttcaacttctcgacttctttccttctttctccgtcgtctttctctcccttctctcgtctccgacgacatcaatttttgccgaaaaactcaatctcttctcttctcgttgtcggctccgttttcgtttcgtctttgtctctttcatctccgtatatttcttttccaatggctagagtaaaagactctcgtggggaatatgaatcaagtgatagggttgaagccggcgaaattcctcaatcagtcgaagaggccgccgagattcctcaaagagatgaagaaggcgcagagcttcttacaacagaagaagaggccggcgaaattcagcctacaactggagttgcaaccgattgtgacgccgccgatttgggtcattctaacaccgtcgaattgtatccaacaaaggatcttttagacccaattgccgaatcttctgatgaagaagaagaggcaacaaatgcatatgttaatgttgatgatgcagcaaatgaggtatgagagaagaccgttatttttttggattgtcttaggctggttttaggagattatgcatcggtaaatgattggatttgtgaatgttgcttcagataaaacaagtagtacaagtaggttgtaaatttgtgaatgatcattcaggaacaagtagtagaactaggtcgttaatgtggaattgaaagtattttggattgaatatgcaggatgatggtgatgatgataacctgccgcagaatatgcaggatgatgatgatgatgataaccaaccattgccgccagaagttatgtaatttgatccaactaactacacgaaggtgtgtaagataggaacgaggtgtcagttggtacaaacagtggaatttatagagactttggatgcagaactgaagtggtttaggaatcatgaccaatttaagcacatattccacatgcctaaggagcccaatcacatgattcaaggcatgtggatgcttatggttcgcacggctaagacagaattggagagagagtgttggtttgttgtcaatggagtacctataaggtactcaattaaagagcatgcattgttgaccggtttgaactgccgtgagtacccaaaaaactataagactttaggcagtttgaagtttgttgagaagttgtttaagaggactgaggacatcaagattaaagacgtcgaagagaagctggaagagtttaagagtgagaagtctactgctaggttgaagttggcaattctgttattcttagctaaggttatgaaagctgattctaaaagggattcgaagatagaggagttgctgcttaggattgtaaaaaatgtcagagcttgtgagacattcccgtggggacgtttttcctttgagcagtgtatggaaggggtgcagagagtaatgaagaacatgaaaggggtggtgaaacccaaggcatagactgctttttatggatttattactccacttgaggtaagtagtctagtaaattatatgaatgtctagattttgttattgtgaacttgtgcatttacttttatgtttttgtgtctagattctggcatttgagtgtattccgcagcttgggaagagatttagagaagctgtacctgcagacaaggaatgtccaagaatgtgcaagcacaagttcaatgaaagttgcatgaagggatttactttgaaagaaataaatgaagcgcttggagatataaaggttagctttgttctcttgaaatctatgttgataatctttgtggtgtttgaaatatatgtttacttgacaggatatttcaagcatcttggaacctgatatggatgagacaaatatgttgtctcgcgttgtagagaagcatgttgatgatggtattggatatatcaatccaattgttgatagctggagagagaggcttatcgtagagaaaaagaaaatcttttggcgtagtctctaccaagcagacattgatgctagacgtattaaaactgtttatgatgtcccagctgtacctgaaatccctgttgcatctattctctcgttccaggaagctatggagaaaggatttgacaagatcacggacaagcttgctgtgatggatagcgaaatcaagcggatgggtgtgaaagtacaaggaatagaggtatatgtggcagatcagcttgagaaagaggcagagaaagcccgttatgaagatatgcatcctggttcagctgctgattttgtgccaccgtcttatcagccaagggatactcagagcaaggccttggttattcacagtggaatccgtgacccagaacctccaactattgagtctctaagtgagtagttttggtgaacttttgtgtattgatgctttcacaatagttcttacatgtttggttacatatttttgtaggtgatggcagcgatgaatccaatgaagaggataagaagtagaagaagaagaagaagaagaagaagaagaagaagaagatattgaagaagaagagaaagcatgttggtcctactctggaaactgggaaaaaacgtggaaggaaaccttccaagtgtaagggggaagagtttacagctgaggggaagcaaacgaggaagagacagacgaaataggactttgacttttctttcttgcttatgtgtgtgtggactcgtaggtgtttggagaaataggactttgacttttcttttgtgtagttgtttggttttagaggacaaacttattttctgaaatggtttatgtgttttaggacttattaaaatcacaatactggctaagttgtccgggttggccggtcaatacacataatttaaaatacaatactggctaagttgtcccagttggccggtcaatacacataatataaaatacaatactggctaagttatccaagttggcctatcaatacacataatttaagatacaatactggctaagttgtcccagttggccggtcaatacacataatttacaatacaatattggctaagttgtccaagttggccggtcaatacacataacttaaaacaggaaaatacatgtctaattaggttcaaatattacataaaatccagaaacataacataatgccatagaacatcctcaataacataaaacacatcatatgattcccatgtagaaagtaatgccctaagcctatcaatctcgacttctttggcgagtaacctttctgtaagggtttcaatttcgccttgcataagacgaacaatttcctggacgaactccaaagcatgattacatgctagttgtccatgtcttagtgcggaataatgtgagtgatttaccttctcaagctcctcagttaccgcctgatcccaccactgaataaggtggtttcgggactcgtactcttcatcctgcgaaagagagaagacttcataaatataggcacttgtactttgttgttccaatgaaatgaaacacaataacttactttaagcattgggcatttgtacactctgtcgtcttgcctgtaaccagttttgcacacttcaagttttacaggcttaccacaaaaacatttgactggaacaccccaatttgcatcggcattcgcctctccactattccaactagcttcggatgtggatggttgagagtaactatagggcatctacagaacagagaaagatagacatatgttacaccgaaattacggcgtctagaaaccctagatctactttgaaattacggcggctagaaaccctagatctactttgaaattacggcggaagaaaaccctagatctactttgaagttacggtggcgagaaaccctatagaaaccctatatcataccttgttagttgttgtcatcgacggcggctgggaaccctaatttcagttgttgtcgtcggcgatgttgagaaagagagaagaacgagagagagagagaaaggaagaaagtgagagaagagtgaaatagaagagagagagagaaagagagatgagatcctgaataaatagggagaaactatgtagtgtgaacgcaataatcgtagtgtgaacgcaataatcgtagtgtgaacgcaagtcatggggtctatttttaaaaaatattatttattagaatattcagaatatacatagttgtatgtatatgtacagttggccggattcacaaacagttgaactattctaaattttgtgtttttgaagctgaatctcaaaaaccaacttatttttttagttggtcccataagttttaacatattaatggcttttaataagttttgatagaaacatatttaagaaatatctgttttcatatataatgtatgtacattggacaatcatgaactaaatattccttgttatacataggttatttattaggaaaccagtttatgatcaagttgtctaataacaatgttgtagtgtcatattttagatttattcaatgtttagttgttgttaatagctgaaaatagagagaattatttaatcattttgttaaccctaaaatacagatacatatatcagttgtctcagttgaacttaaaaaaatacattaaacttgcaaagaattcaataaacttacacatatttaatacaaatacgaaaacataaaacagttgtcgaagtttaaaatagtacatcacacttgcaaataatataatacaaatacaaatgaactcagttgtattggttgaaccctttctgcagttggtcaggttgttcctgttgaaccctttctgcagcagacttagtcaaacttcctcaagctgcagccaagcctccaagtttattccaggttgcgattttctcctctttcgcgtttcaccaactgatggaaaccgcttatcttgattccgtcctggtccttttggtgtgtattccggtggaaaggcaactaactctttaatttgggtaggaagaacctaatccgactcatgtgggactatgtacaacgttcggtaataggccaatgcccaactctctatcacgtaatacacagagcagagtccgtagatggtcgtattcgcatttctcccttccttgtggcgaggtgccttgctgcggccatggacacacgggatcttgtctatatcaaaacgtttgcatgaaacacttttcattttcaaatccaccaaaaaacttaccgagttgagattaatcacgttgtattcttggttgtaactgttaagctcaatcactgttaatttggctgcaactggacatctcaagtgcaatatgttctccacagtaggcacaacttgtgatgtgattgaacaaaaacatgaatcttgcctatgcacgttgaagcattcagaaaacttagaaatcatcacatcaatcattggtaacaagtgatacttcctcgcttttctaaacacaccattaatggactccgcataattactagtgtcaatgttatacttgtctcttttaaaatggcacctcgaccatttctcaaaccctactttctcaagaaagtcagcatctttaggccatatacttgtaaaatgaccaaactctttgttgaactcactctcagtatatgcatgagcacaatccctgaacttgtcagcagctccatccttgttaattttcaaaggaagtctcatgttttgagacaaatgccatatacaactagcatgaagcgcattcaggtacaccatcttgacagctttctttatgttttgatgcctatcactaataaacaccaatccgggaacattcggatatacagttttcagcttttctaagaaccaaatccaacttacatccttctcgctatcaatgattccaaacgcaagtggataatggtgatgattaggatcttgtgttgttgcaataaccaacatcccaccatacacagttttaagatgagttgcatctacaactatcactttccgcatttccctaaaaccttcaatgcaagcgcctaatgcaatgaagaggtacttgaactttttctctccttccaactccacactagttactgtccctggatttaccttctctaacatgtaaagataagaaaataacatcgtgttccttctttccggagtccctcgcacatcactaacatgtagcattttgcctcttaagacagtggagtatgaacaatgcaccccaagtcttcctcttacaatcgacataatgtttattggagttggggtctctaaatttccgggatagtcacaatgcaaaaccgatgctattaatcttggtgcgcctcgctgtatattgttgcttgtagtctcaacacttcgagagcatgtatgcacctttctatgcactctaacactcgaaaaatgtgatttcttagttctcgcaactcttagataccaagtacaccctttagaagcttggcggcatcgtagcataagtctcaacggttctgacttaatagtattgaccccaaaaacttcttgctttgcagctttgttaaccaattcccacacagcctccctagaacaaaattcttgatcaatttcaatacacgtaccatcatcccattctttaacatgcggagtaacttctacacttcgtggaatatcgtgaatatcatcataatcaatcctaacatcctcatcttcttcctcatcaaaattcaccggcctttccattggcctttggacagccacaatctccatacctactacattctcacaatcattcacatcattctcatatccatcatgcaccatctcacatacttcatttaaaacatcatcctctcttacatttacaccaactgaactttgacgctccggtacagaaatttccaccctctcaactcctataccatttaattcctccacatgcaaaacaggaatacgactctcttcatcagattctgttaaaaatatgaagacgtcctcatcatctacaatatacgtctctctccgaactttagacagattgtaactcagtttcaacttcaaagaagcttcatcaatcgcaactttcttcatgatcttgtcaactaacatcaaatatgtaatcttccccaaactactcgtcttaaacgatatagcatatagtgaatttttaccaatccactcattgacttcagaatagtatcctccgaagtcaaaatgtaccttagtgtggatcttcttcttcatcgctcctgaaaattcaaccagttaaactccaatcaaacattttaatagttataccacatgtactcttatcatacgtatagatgaaattaatctgtcgtcgcactcgatttagaatcgactaaaccttccattcaattgatttccaatgttaataaatacctattcgttaaactaattggttaatctaaactttgcaaacccaaactccatatctttaatatgaaatctcggaattcaaattcaactcacattcaacctacattcgattgctcatcacctcaaataacgtttcggcaacctctaatcgattagtctttactttgcaacccaatcatcaaactatcatattgaatctgggaattatatataattcaaaatagcaatctaaaatcacaatgcaccattgtcaaaggaaatatgaaaaaaattgacctaatttgttaccttttacgacggtttttcaagtcggcggcggccagaatcgatggtggcggacgaagaagaagaacgtcgacgaaagagagagatgacgacgacgaaggagagagaaagaggatattgaagtcgattttctttatttaagcttttgaatttctttttcattttttttaatcaactcattaagggtacaactggtatatcacattttcggtggcattcagattaaccgatggcagtccagatcaattttctgataaaagtggcataagtgataaaaatccctaaaatgtttgccaacagttttttcatacttaaactacttaaactacaatactcggtaaatatcaatctaaactcactaaaattcaaatttccagcctaatttatataaaaatagctaaaatcaacatatgccgaaacggtgttaattaaccacttaagacgataagttagttaaccacttaagacgatgagtcaaccagtattgtggcaatgacggagcatcgaagttgagtaaaacaatgttgtttcgtgagtttagggttctcgaatcgaagattcgttggcgattgctttagcgattctttgattcgagaaccctaaactcacgaaacgaagtcgtattactcaactatgatgcctcgtcattgctacagtgtcggctgactcatcaccgttaagcgattaactaacaccgtttcggcatatgttgattttggctattttcatatagtttaggttggaaatttgaatttttagtgaatttaggttgatatttttcgagtatcgtagtttgggtataaaaacccgctaagaaatagtctgggttgattttgactattttcaccgaaaattatcggcagtaatgactcttttgatatctaactaaaaaacggatgacagaaaaaaaggttatcggcagttttgtaatattttgtttttgtttaagaatatgttagagcatctgtaatgtagggttctctttataatttgagagagttttgttgattttgttgattaaaaaaataaaatcaaaacaaattattttgagagagttgacctcttaaaagagagtttggaagccgagaaagtcagacacgtggtagtagatgataggttgattttatgtaacaagaggaaaaagaaaatcttttgtctttttattttttctttgtgtcgggataactcccaaacttctatctctccccatttcgagcaaaggcaagaaatttctgatttcgttcagtgtggtgagttaacaatcatgaaaattgcggtgtgtatgtgttcctgtcgccggagtcatcatctctaaacccttttctcgccatcatcggtcggaggttaatctaatgagacatttaggatgtgaattagagagaagacgttgaaggaagctctagtttcttcgtagtagtatgaatcaagctcttttcctttgtagataatgattaaagtttgtcgtttatggtgaaaatcaaaattggagtttataaagtttaccaaaattagggttattcattcatagcaaaattaaagtgtttttgaattaatttggaggctttttgtttgctatttcgcttgattgtaaaagaattttatcaaaaattaattgatttatggttgatagtttcggcaaacacattagggttatttgaatcttggatgccttgttttacttatttggcatgaatgaagaataaatttggaaataaactttttgatttttgtagatagtatcatttaagcataatctctgttttagaatcgacaagctttttcagatggttgctagtcactgtaaggtttgattttagttttcatacattgaaatacatatctttatgtctgttttgaatcattaaaagcattctagaaatcgatttcttcatatatgttatttgcttgaaccaatatgtagttctgaatgtgaaatgtttatgctaatgtgccctatttctctctgtttttgttgttgtttagtgtaaatggaaaactgcaagtggaaaagacaagtggagaaagacactagtgttgtcgcatgaggatttactgcaagtggagaaagcttctacatgagaaaataaatcatccttgtctttgttattgcattgattgtgtaaagtaggtaaatagttaagtacaaaactaatgaaactgagcatcaaactaattttgctaattgctttttattttatgattaatgtatgaataatattgattaagattgttttacataaatgcttagttgtatgttctctgtattttttgcttagttggtttagattaggtacaaactttaatgtctttaccttgccattttttgttaagacattttattaagtacatcttctttaagcttaaatataaagtcttctcttacttaatcctccattcgtcttctcttccttaaacctaaagattctctgacttaatcattctcctctaaacaagcaaaccaactccaaaatagattattacaatcaattttctcagccttccagttttatggacctgttaacaagatactcataacaatgacatcaatccgtatgagtttgtggaatgcaatagtctaatgacattcatgaggatcagtggcggaggtaaagagtaattatgggggtaatatgacacccatcaaataaaaaaattcagcttatgtttttaaacgtaattatttgatacatgtccaagaaagctgttgatacccctcttaaatattattgacccctcagaaaaattaaaatagaaatatgctattaattttaggaattatctatattttaattgagattcaacattctgtcattatcgttgggcttttctaacgaactgctgggctttaactaagtattttttatattaattttgttgtttaaaacttaattataaaagtcaaatccctgaacggcaataacaaagcttcacaaaaaaaacttgagtctcttccttttcgttcttccttcgtcgtctttgctagagaatcgataagtcaattttttatcattaactaaatctgttaatatcttaattttgtaaggtttcatcataattcttgattcctcatcctcaatcatcatccaatattctacgtttgtagaaaatatgttttttaaagaaatttttgtttaataattcaagtagttaaagtgataagcacatttttagacttgtgggaggaatgtttaatagtccttcttacttgaatatattttaatgagatcataatttattcctaggacaaaccgaagacatttacaatagtctctttgtttgattagattttcaatagtacatataattatgtcgacatttggaaataacttttcaattttgatattgatgcttttctttttatgtaggcaatgcaaatgcttgatcaatttttgaaaaaaaaaatctccacctcctaacatggattcaaatgattcagatgatttgtcatgggatccaacaaaaagaaaaagtattctaagctatcatcccgatcaaagagatgaggtacgacgcatatatttgataaaaggaccttatcaacctcgtgatcataattttaaacaaataccaataggaggcatattacgacgttttaatccacaatggtatgatcgatatggtgatgattggttagagtatagtgtggtaaaaagagaaagccttttgcctatgttgttatttattcagagatcaagctgagaaacaaggtgggtgtgatgcttttgtttctattggttatagtggctggaataaaacatatgggtttactaaacatatggtgatcatactagttttcacagaattgccaaaaataaatgtgcggatttgatgagacaaggtcagtctatcaaacatgcatgctttacataagcaaattgatgttatgaaaaaacgaatgccgaattcgatcgagtgcttcagttgatatttctagacatttgttacatcaaagattacattttcgtggtcatgatgaatcagaagattcaacaagtaaaggtaattttttggagcttctcaaatatattgcttgtcagaatgagaatgcaagaaaagttgtgttgaagaatgctcctaaataatcagatgacatctcctccgattcaaaaagatattatgcattgctttgcaatggaagtaaccaaatctgttattcaagaaattaataacgatgtctttgccttattggtggatgaatctgcagatattccagataaagaacagatgacagtggttttccgcttcgttgataaagatgggatagtaaaagaaagatttgttggcattagtcatgtaaaggagacatcttctttatcgctgaagaatgctattgaccctttgtttaccaaagatggattgagtttaaaaaaggtgagaggataaggttatgatggagctagcaacatgaaaggagaatttagtggaatgagagcattgattttgaaagaaagtagttatgcatattatgtacattgcttttctcatcagtttcaattagttgtcatgacggttgcaataaacattttgaagttggagatttctttgatataatttatgtcttgttaaatgtggttggagcttcttgcatgagaaccgataggatccgcaaaaactatcgcaaaaaggttgaagaagggatttgtaatggaaaacttaatactggaaatgtgttaaatcaggagctttcacttcaaaaacctgcaaatacgcgttggggtacacattacaagactttattgcgaattattgaattcttttcatgtataattgaatatattgaatatatccaggatgaagacgtagacaacatcaaaagacgacaagcaaatggcctcctcaaatattttcacaccttcgattttgctttctatcttcagttaatgctacatattttagggttcgctgatattttatcacaagctttacagagaagagaccaagatattttgaatgttatgtcattggttgcatcgactaaacgagaggtacataacctaagagatgatggatgggatgattttctcgctaaagtctgttcttttagtgagcaaaataatatggaaatgcttattaaggatgaagagtttgtcaatttacataaccaacttgcatcattacaaggtggactattactacaatgtcttagatatgcaacttcaagcgtttaatgatctatttgacgaggtaaattcagaaattttgttttggattgcttctctaagtccaatggattcttttagtcaatttaagaaatcaatgctggtgagattgactgagctttatctagatgactttagttttgtggagcgcatatctcttgatcatcaacttgacatctatcttgataatgtgcaaagagatgaaaggttcactaatttcaaaagccttggtgatctatctcgtgtgatggtgaagacaaagaaccatatttctcatcctttggtttattgacttttgaagctagcgttgattctacctgttgcgaccacaactgttgaaagatatttttctacaatgaacattgtgaagacggcattgcgtaatcaaataagtgatacattttttagtgattgtttagtttgttttattgaaaacatgtacttgataccgtgacaaacaaaacaatgattacagtttctaaagtatgagtgatcgtaggatgcatctttaaaaaaagtttccaaagtatgagtgatcgtaggatgcattttttagtgattgtttagtttgttttattgaaaacatgtacttgataccgtgacaaacaaaacaatgatcacagttttccaaagtatgagtgatcgtaggatgcatctttaaaaaaaatttttaatgacatttttttataataagattaatgtttacaaaaaaatttatgacctccgcgactagtttttctggcttcatcactgattaggatgaaaacactcctaaggtgggtatatcaagacagaatcggtcagcaaaaggggatgttatcctcataagtgtgtggttaaactagcaaagacgaggtggtcgagaataagcaaaaaactcaagccttctagataaagattgctttatatgtatcatctactccgaaccttgctagtttttcaaagagaaagtctgctccatgtaagcaaaggtgggagaaggtcaatgaactcgtcatgaagtttgtgggctgttatgcgacagtaacaaaccagaaagctagtgaccaaagtaaaaatgatgtaaagttttggcaaacaaactattcataaacgatatgaagaaaaagttcagtctggatcatgttcggaaggagctatgaaaacttttttttaatgtttttctaaggtatttttgtttgtatgaaaatgtgtgatatatgctttaatgtgcacttctttgctttgtaagtccatgttttgatatgtacttcttgttaatgtatgaaattgctttaaagttgtaattgtttgctttatgagttattgtctttttctgtgctttgtgagttattgtctggatatgtgattgtttcttaatccgtacactattgttttcatatgtcataagttgttatctagatatgttgtcgtttcttaatatgtatactttttgtcttcatatgtcacaagttaaatataacacttgtttgctttgtaagttcttatcattatatgtggttttctctattatacacgttagtggatgagtgaaaacaaagatgaaacgactacatgttcaacatgtgtagacgatatcataggagaaagaacaaagcattttgtaccacaaatatttgtggaatcaatttgtaccacacataaatagttttgtatttctcttgctattgctatatataatggatgcaattttgttctctcatttatctcaatgtataaaaattaccaaatctgaaaatttgatattttccttctaccacaaaacaagctaccaccaaaaaaactgaaatccacaaacatagttttcttcttattcgtaattttttttgttcttgttctcattctttaaattttttgttctctcttctttcatactacaagctataaaaaatatggctttctcatcatgtactccatttgatgatgtcatagaacaaagctttgatcaattactcgatcaacaattcgataatatgtcgttgttttggaaaatggcgaagggggcaaaaaaaaaagcctatattgatagaaaacgtgaagaaagtcacatattctaatgaaacttattttagtgataatgcgatattctcatctcatatatttcaacgttgctttcgaatgaacaagtcattgttcatgcgtattgttgatcgactctccagtaaaattctattctttcaacattgaagagatgttgtcgtacattcttctattggaagcatctcttcaatgttgaaaatacgaaatttcattgaagagtcgatcaatgaaggtgaatgagatgtggatggtattcggcggtcatccaatcagatttggactaagagaattttgtatcgtaactaggctggaatgtgggaagtatcccaagaagaaagccgttggaggctgttataagagtgaaacatgggtgtaatagtgtttggaagtctctatttagtgagaggtttggggagcaaccgaatccaacagttgctgaattggtgagctggttgaaggaggaggaaagcatggaagggtggaagcaacaagctctctctcttttaattatggtagatggtgtgatagcgtcccacaattaccccaacagaccgactttgaagactgtggagatgacgaagaacgtggaattcttctgcaaatacccatggggaagggtgtcttttacccgtactttggggaggatagcaaaatttcaaacaccttccgatgctgaactactgataaggggtttactggatgggtcttatgcactccatggctttccattagcactccagctgtttgatttcgaaacactcccatccattgcttagaatttcgaaacactcccatccattcattgccaacaataccctgtgaaaatttcttaatggcatcaaccaaaccgtacatcagttggtatcggtttagtttttgcggatcatttttgaaaaagacaaaaaaaaaaaactgaaacgaagaaactgaagaagacgaaaaagagaaagaaaaagagatggatagatttgagagagaattagaaagcagttcgaaattcagtatccactccttcatatttcgacatcacttcgaattgttgggtagttgaattaagccactgaactccaaaatccggcaaagagaaagttgcaatttttccggcgaagtgaggaacctccggcgagatagcaactttcgctatggctgggaataaagcaaacgatgaagtcccgacgaagcaacatacccaagatactggtccagagaaggagaagcgggtactcagagtttccccgcggagaaaacgctctccgacaaaggcaacggaggaattgagttagtatctctaatttaccgtctcttgtctttgggtgtatcggaatcgtaaaccctgaaaatatatatttttatgataagaataattattttataatatacaaaaaaaaacaaatttagtgaagataataaaacaatataacaaaaaaaaaaaatattcactgataattctcattttaaaatttaaaacaatataaatagaaactatatataaatagaatttaatttaattaaaaaataaaaaatattaaactaattaactcaaaatatttaagttgaaaagacaaataaataattatataattgagtaattgagtaccttcaattctcaaaaaaacaaaagtacttgtatttaaaataaaaaaagaaattaaaaaaatgaaagaaaaaaagaagaaagtacttgtaaatatatgtgtgttgtgtgataaaaaggtaatacatatatttgctatttatatcagaaaagtagattataactaattcatgagtttatttctgacataaatgttaataattatagaagaacgtttgcaacataaacgttatctgagtaacaatttttttttttaaacgttacataagaatttaacattcatcctactgagccattaatgaggttaatgaagtttaaatgcatggtgtttaattttaattttcgttttctcattgctattatccgttaacaaaactttacatttatttgagtttagtcatttgagtcttttttaataaataatttaataaaagcatttgtaaatattatacataaatcatattttagtatatatttttctcagaatattatactaaatcctatttttagtatatatttttctgacaatgattaatatttttttttgttttaaagtaaactttatataccatagagcctacaaatataacagagtgaaataaaagaattttagaatgtaaaattaaaacttaatgaagaggacacatgtcactaaaatagagcgccaaatgtcgcattggtatacagggttagaaaaaacccttgtcatattatataaatatgtaacatatttttagaaaaaatatatactaaaaatatgatttagtataaatgtataatattcaccttctcattcaccttcttctagataaattttctttttcttttttatccctgtgaggagcaaaaagatattaaagttttcttacaatccatgaatgtaagaataatactaaacaaaacagtagtccatcttaaactttccactcaaaaccacgcatcattaagaccaaaatttgatggatactgaatattgaatatgcatacgtttttcttagctttaaatagaattgacacctttgaactcaagtttggtcaagacactttcaataggctagtttctgagttttgatcttttatttttatattttttgttaaattaattagttatttaaagattatatacactataaatagatagttaaaatgtttaaacccatatacattttaggccatttatataaaacaatatgctataaactcaagttcaacaacaatattcatcagatttttcttaacaatattattggtcttttacttaacaaaaatattaataagtttacaattttgatttatataagagaatattatgtaattaggtactttttggaaacttaatgccgattaaggcactttaaaaggattgggcacttttctaagccaaattgtccaatttgtccttctaagtataacttcctttcgtgataatatttttttgacttatatctctcattcttctctctcttctctctctcctctttcttttttctcactttatcgagaaataaacaaaatcaagcagaacaaaaaaacaacttttctcattattttgctatttctttattttctcatcacaagtcaattcaccaattcgttctcctattttgatcttctcgaattcctatggcttcattagtcaagttttagcactggtggagtacaaaaatggcaggcgtgtaaatgacgaaagcgagtacattcaacggcggaagaaacagtcagtgattcgcgacaggagatttgggtctagatctaaaagtcgttgctttattcgatgtctcttcttagttgtttctccaacagatttgttatggtttcttgcgacggttgtctttgatatggtgatgaagtgtctgttggttggtggaggcaatcgagttgttggtggcgactgagagagcgttctgacttattcatcatcttgttctatatatgtataacttatgtgttggtataaacaaccatatggattgcacatcttggacacacatcaatggacaatgttgcatttgtttaccattaatgtgtcatcactggatatgaatccattatataattatgatagtgtccatactctatacacaagtgaatattggtcaaagaaaaatggacggtgtatttctgttgagattgagttcttgattaaatatgtaagacaaaatgcttcgatgagaacatgaataagaagaagaagctcaagcaaaagaagaatatgcatgggagaagatgaaataataagtgattggactaattgttttgttaggcctaaatgagtaagtgtgttatgttagttaaagtttagcttagtgaagagttgttagagttgttgttgtgtaagagttgttgataaaccttgcttgtaagcttggttataccttagagactagagtaatgatgtctaaaagtaaggtctaggtctaagtagaagcataatgcaagtgtgtacttagtagaagtaaactagtatgaatatgtgtgtgtatgtcttgtaataagaatctatttttggatccaatacaaaaatgttgacaactaatgttttctcttttctctctcttactaatcgttttatgtcttcgtgtcaaaacaagaaactaaccaaagactgagagaatgagagtgaaggttctttttgtgcttgagttaaaattagtgagtgaaacaaagcattaaagagaactaagaaatgtaaaagaagtgaacctctaaaagttaaatagaggaagaaccccaaaagttcaacaaaaattttatcaacgattattgttcatgtataaatttgtgcattgatataaaacaaactgtgagttactaggtgaccatttggacttgattgtttggacactcgtcagtgaacaattatgtctttaaaaagaatatctaaatgatttagaatgactaaatgttttttaagaatcagatggatggaactttgtggacaacaatcgtaccaaaagcaccacatatagcttttccaattcttaacatgtaagaccaaaagattcacaactctcatcataacaatctgcacaatccacgatgcgtcatccataatgtgccatccatataaacattccattatcgtcatccacattgttagaactaagatacaaacattccataaacaagcaaaatctaaaatctaaaaagccaataatcatatgatcagtttaacgtcatcaaattcaagagagtgtccaagtgctatgcaatgataagagtatccatatacatgtgaacaaattgtcaaaacaaattggtgattgtagctaatgtaaaaagtcatatggatatacaggtgtggataggtgtgtgatctaaatacatcatttctagatccgtaagatgtatctgttgggaaacgatagctccaataaaaccaaatatcacatcttccctagcatttttgagctagaaagggattaacacaaagttattgttagccaaagttcttgaaaaccaactacgtatctataggctggaaatagagcaaaaattaaacaaggaattcaaggtgttcccagagaagggtattagaattttaatcggaaaactagatgcatcttaacaaatcaaatttaatgtcaattcacaacattcatatcactggatcctaacttgggattgagtcaactacttaatttaaaattcttcaagtaatttgtcaaatcgatcctaaattgtgattgaatcctatcttaatatttatcaatttaacattcaatcttaagaaacagataaagccaagtaaaaatccaatatcagagagaataaaatttggttaaagatgctcttacctctcccaaacaatgattcagtttttcttcttccccaattcaaacatccctagtgatctgagttgagaccaatattttctgtcttaatcttcggcgaattggatttctaatgttaataatccttcgataagaaacgatggtggtggccataaattttccagcgaatagagaaaaatatacaaaaccaaaaaaaaaaaaaaaaaaaagggtaaacatagattgtgattgtgaatttaggataacctcataattttatgattttgtaagaattatagagaacgacaatgattttgaaagagagattgaaaatgatgaaaaacaaaagaatatggaagatagagatgataaaagggggatagttttttacccacacgatctcatcaaaaataagtttactaattattgcgtcatcactacttcaggggtaaattagtccaatttctcctcaaaaagatggcacagtgcctcatccctgaaaagtgccttaaaaggaataaaattctttaaaagtgcctaaacgtgtcacattccctttatataatattgaattgatattttagctcagaaccggtaaaacaaatatatatatatatatatatatattgtctaaaagtaagtattataattttataagatttgttatagtttgaaattattttagaataaaattaattgatattttggcgcaaaaagtattatattaatattctattcttcaattcttgacaaattattatttgagaaattatattgtatggtaattatataaactattaataaatgatacatcattaataaagataaataattactaaaaggtattttaaaaatggtaagagatttgtttaagataaatatatataattaaattgaataaatatagaaaattatgtattttaattttagaggaatgacacatgtcgaaagaatagagcgccacttgtcagtctcttagagcatgagtttgagaaaactttactttattatataatatgcgccacttgtcagcctcttgtcattcacgacaacatatctagacaacaacttatgacatatcaaaacaatagtatacagattaagaaacgaccacatatctagacaataacttacaaagcaaagaaaaaatagacaattactaagagagcaaacaagtgcaacattaaagcataatcatacattaacaagaagtacatattacggctgggacttacaaagcaaagaaaagcaacattaaagcaatatcatacaaacaagaaagacatttaactaacaagaagtacttagaaatttaaactttggacaacaaatttgtaattagcttattgttaagagccaagtcaatgtttaatatagactcagttcttaaaagtagatccttcaagcatatggttcttgctttgcttctcttaaatgtttgattttgttttattttaaaattttaaatatttagtatataaaattattaaatgctttcgaccctagaaaaaaagtttttctggatccctcactagccaaaatcatactttggatcaattaatgaagaaatggtcagtaatttattctcgtggggtattgaatatatttgatgagctaatggtgaatctagttgacaaggaaaagattgatccttctatgcatttggataaagttgaatttgatcaagagggtgaacaaatcattgtttacaacaatgggagaggaatttcggttgaaacatacatgagggaaattgtagataacatgatttattattcttttgcaactttgtaatttaagaaagttatgtagtattttgtaattacataaatttctagaaagttttagaacaattttatagagtattaactaataagtgctcatgtctaatgaatttgatactgtatttcgctccaataaaaaaattacttgcatatgaaagtttggagaacccaaaacctctattaaaaaaaaaattctatattttgtctctaaatcatgtgtttaagatgatgatgcatgtatgatctacactcaaacgcctaaatcatatattcttagaagataatgatacaagaaaatcaaatctttgtcaaagcccatttgggatgttaacgaagaatttgttttaaattaaaatttttttttttgtcaaagctcatgtacaactaaagtaaaaaattcgatataaaccaaatatattgaattagtcaacataacacaaacgggaaggacaatcgttcctctaccgttcctttttctctctctctttaaagctttttccaagttcttagatctagtttgttttcgcctctgttctttatcgtaggtcttggatttacaagacgaagcaggagtgaggcaagctatcttctccggcattggagtggtgtggattccgattagcgtgacagaggtggccctttcttagagacgagaggcttctcttccgattcttcctggttatggacatcgacggagatcggtggagtatttcttcgctcaactggtcggatagacgttgtacctgcatgttggaatattgagataaaaaggaaaaacaaagcaagagacatttgtctcttctcttctaaagaagacaagaacaaaaataaccctttattgaactgaaacttgttggtgtgtcacttcctatttgtgacttttcagtgaaacaacacaacttatccaacaagtatgatacaaaaccacacgtgtgagtagtcacgtgcgacatcaagtgggaattgggaaagaataagaggcgagcacgtgtcatctgcagagtgagggactgaaagatgccgttagccgactatatgagcactgttttagctcattcctttacttttatcgaatatctgtaattccttagaatctctgagaacattttgtggctagaaatctcacttcgagatctagtggattgtttgggtgttttatgaacatcgattcgatcatctttgtaatcggaggttacagagaatcagaaatttgctgtattaaaggtatcagagccatttctttcctcggaaaacatggttcaaactcgttcccaggatgattcgaaggacaagggtaaagaggtggaaggtgcgaatcctttggaggaaaggatgttgcgtttggaatcgatgatggatgctcacagtaaggagatgatgaaacacatggctgagatgacgatggtgatgagtagatccactgctcacaagcttcgtgaggaacattcgagtggagagaggagcttaccacgttcgtctacctcgaccgatgacagagtgggttatcaggatcatcgccgtgaccagggacaagatcaggatcatcgccgtgaccagcaacaaaatcaggaccatcggcgtgacaatcgactagatcaggtccgttatgaacctcaacaacaacattacggtaacctgactcgcttgggaaagattgatttgcctcgttttgatggtactgggattaaggagtggttgttcaaggtggaagagttttttggaattgattttacacctgcagatctgaaggtgaagatggttgctattcattttgatagtcatgctgcaacatggcatcattcttttatgcagtcaggtgtgggtttggaggtgctatatgactggcctggttatgtgaggttgttgaagtagaggtttgatgatgaatgtgatgatccaatggctgaattgaagaagctgcaggagacagatgggatagttgattatcattagaggtttgaacagattaagattcgggtcaatttatcagaggagtacttggtgagtgtttacttggcagggttgcgtgtggatactcagatgcatgtgcggatgtttcaacctcagaccgtgcgccattgttttcgtttggggaagttgtatgagaaggcacaccctaggaagccttattcaacaccgtggcaacctaagactgtgggacacacgaaagctggcagggaataaaattctaagatggagagtcacagtaacaaggagaatcactactccaaaccagatttcaaggcaggtaacacaagacggctctctcagcaggagatgagtgagagacgagctaagggtttgtgctatttgtgtgatgagaaatttactccggaacactacttgtcacataagaagcagcaacttttttgtatggatgtggaagatgaattcgaggatgcgttggatgagattcatggtgaagatgacaaaatcatgcctcagatttcagtcaatgcagtgtctggaattgcaggatacaggactatgcgtgttaagggtacttatggtaagaagacgttgttcattttggttgattcggggtctactcacaacttcattgattccagggtggcagataaattgggttgtcagattcagaattcagggttggctcgggtttcagtagctgatggcagaaagttaaagattgatgggaagataactgactttgcttggaagttgcagactacagattttaagtcagatatccttctaattccgttacaaggagtggatatggtgttgggggtacaatggctggagacgctgggaaggatctcatgggactttaaacagttagatatgaagttcagatatcaaaacaagaaggtctggttacatggaattaaagagggatctgtgtgtgaggtgaaggcacagaaacttcaaaaacttcaggaggaggatgtacagattgctatgttatatgtgagaaatatgcagtctagttcagaagatgaagcagaacaatgtgtgggcgcagttaatgcattgacagaagatcttggagatgagtcatttgtggagactgtggttaatgattttcctgatatttttgttgaaccaacagagttacctccattttgagcacaacatgaccataaagtttaactgatggaaggttctaatccagtaaatcagagaccctaccgttatgctatacatcagaagaatgagattgataagattgtggaagagatgctgtctagtggaacaattcaggtcagttcaagtccttacgcatcaccagtggttttagttaggaagaaggatggatcatggagactgtgtgtggactatcgtgagctgaatggtatgaccgtgaaagataggttccccattccattgattgaggatttaatggatgaattaggtggctcagtggtgtattctaaaattgatatgcgagctggctaccaccaagttcgaatggatccttcggacattcataagactgcttttaaaacccacagtggtcattacgagtatttggtgatgccatttggtctcactaatgcaccagccacgtttcagagtctcatgaactccattttcaaaccattcctgaggaagtttgtcttggttttctttgatgatattctgatttatagtagatctacagaggaacacaagaggcacttggaggctgtctttgctttaatgagagaacataaattatttgctaagatgagcaagtgtgcatttgctgttcctaaggtcgaatacctgggtcatttcataagtggagaaggaattgctactgatcctgccaagattagagcagttcaggaatggccgagtccagctaatcttaaacaacttagagggttcttgggattaacgggctattacaggaggtttgtgaagaattatggtgctattgcagggccattgcatgcattaacaaaaactgattcttttgtgtggtctgcggaagctcaagttgcttttcaaactctgaaggatgcgatgtgtaacacgccagttttagccttacctctctttgataaatagtttattgttgagactgatgcgtgtggtcaaggcattggggcagtgttaatgcaagaagggcatccactggcgtttatcagcagacaattgaaagggaagcagttgcacttatccatttacgaaaaagaacttcttgcagtaatctttgctgtgagaaagtggaagcactatttgatttcaaatcacttcactatcaaaactgatcaacgtagtctgaagtacctgctggagcagcgtcttaatactcctattcaacagcagtggttacctaagctactggaatttgactatgaaatccaatataaacagggtaaggagaatttggttgctgacgctttgtccagagtataagggtcagagattctacacatggctctctcagttattgaatgtgacttactcaaggatattcaggcaggttatgatgcagatgttgaagttcagagtatcatttctgcactgaaactgaatggtgatgctaagaaccactatagttggggtcagggtgttttgagaaggaaaaacaagattgtggttccgatgaacaatgcaataaggaactcgattttacaatggttgcattgctctggtatgggaggacattctggtcgggaagtaacacaccaacgtgtcaaggggctgttttattggaagggtatggtgaaagacattcaagcttttattcggagctgtggcacttgtcaacaatgtaagagcgacaatgcagcttctccgggtttgctgcagcctttacctattccagagaggatttggtgtgatgtttccatggatttcattgatggtttgccactatccaatgggaaatcagtcattatggtggtcgtggatcgccttagtaaagctgcacagttcattgcccttgctcatccttatagtgctttgacagtggcgcaagcttacttggatcatgtttttaagttacatggttgcccaaattccattgtgagcgatcgtgatgtggtgttcactagtgctttttggaaagatttcttcaccctccaaggcgttgagttgaaaatgtcaagtgcttaccatcctcaaagtgatggccaaacggaggtggttaatcgttgtttggagaactacttacgctgtatgtgtcacgctaggccggagcagtggagtaaatggctagcgcttgctgagtattggtacaataccaattaccacacctctagcaaaatgacaccttttgaggtggtctatggccaaccaccaccagttcacttaccttacttgccaggggaatctaaggttgctgtggttgcacgttctttgcaggagcgtgagaatatggtcttgttccttaaatttcacctcatgcgtgctcaacatcgtatgaagcaaatggctgatcaacacaggactgagagggagtttgatgtgggtgactatgtgtttgtgaagctgcagccttacaggcagaattctatggtgttgcgtagtaatcagaagctgtcacctaagtattatggcccttacaagattgttgatcgttgtggtgaggttgcttataagttgcagttaccactgggatctcaaatccatctggtgtttcatgtttctcaattgaaagttttggtggggaatgtgacaacctctactcagctgcttactatcctgcaagacgtttttgtgaaagagccggagctgattctggagaggcagatggttaaacgtcagggcagagcagtcactaaggtacttgttaagtggaagcatgagcctgtggaggaggcaacatgggagttccttttcgatttacagaagaagtatccacagtttgatgtttaaaaccttgaggtcaacgttctgttgaaggggggagatttgatacagaaccacacgtgtgagtagtcacgtgcgacatcaagtgggaattgggaaagaataagaggcgagcacgtgtcatctgcagagtgagggactgaaagatgccgttagccgactatatgagcactgttttagctcattcctttacttttatcgaatatctgtaattccttagaatctctgagaacattttgtggctagaaatctcacatcgagatctagtggatcgtttgggtgttttatgaacatcgattcgatcatctttgtaatcggaggtttttgagttaataaaagaggatttacagagaatcagaagtttgctgtattaaagtaacggttataacatctcatgttttgctctacttacgcatatctaattaaatacatgatcaaactcaattataaactaacaatcccccttaattgagttttggtcttacaccaaacttgctcaatagtttttcaaactttgacgttgtgtacttcttcttcacttgcaagtaaaacacttgtgtccgactttctctatctcaatggaaaactcttatgcttcatcttaatatccaatatctttcttatggatcgtttgtcttcaaataagactctgtatccattgcatatcatttgaaaaacactcaacagatttctcgctaaaccgagcacttgaaacacctctttgatgatcttccctccttggcttctcatcacttggatatttccttttcctgccgtgttatatgtttaccattccctactttgatcgaaagctactttcctccttaattgaatttctgttttacttcaagtgtttttctttgttcttctctttgttacacaatttgacactctttgtcaattgtttcttcttcaagacaatggaactcgtggcatttctcttaccagcgatctttctccatgtctccctctcaagtctctcgtgacccttcctcatgttttcttcggtttactcttcaactgacttatgctccattttctccaaggtaagcatcctcttatgctcaattttttttccagagctaagcatcctcttgtgctccatttttctccgaggtaagcatactcttatgctcgctccattttttctatgaggtaagcatcctcctttatcgcttggtgcctctatttgatcaccatcacgtctttgtgacgtttcttcttcggttatctctggtaaccttccaatttgtgttgtgcgtgaattttcacgtcttcttcgaacaagtttcagaattctccttccacaactccaaatccacattcgttttctctgttgccttaagagaagattccctatcttcttcatcgctttttggagcctctttcttgtgaatatgtatgtgaaggttgatggtactctcttttgtcaccacctcttctttttattctttctctgtttcttcttcttctttttctcggttgtcattgatttgttgtctccatctttctcttgttctcgcagcggatttcttattcttaggcttctctttgtgctttccactggccctcgaatcaataaagctttgataccatgttggaatattgtgataaaaagagaaacagagacacttgtctcttctcttgtaaagaagacaagaacaaaaataactctttattgaactgaaacttgttggttatttacatgatgatacaatgagtttaaatagaaaacaaatagacacaacacatgaagagttgtgtcacttcctatttgtgtcttttcagtgaaacaacacaacttatctaacaagtaacggttataacatctcgcgtgttgttctatttacgcatatctaattaaatgcatgaccaaactcaattataaactaacactgctcggaagacgctgtagctgcggcggaagacgctgtggattggtgtgtttccagtgggtgttcgatggttaacagcatatccagttttggatctgtgatggcttatgcggaatcaggttgctgaggggttgtctgagctatcacccttcactagccgccttttttctgtatccatcaaaccggattaacgattgtttgcttctaaaagattttcagatctacgattttcgtatactatggtcattgatctcgctcgggtggttgtgttgcaaagtagtgggccttgtatacgacggtactattagatctgttcgttgcctccgttttgattgtccaaatccaactctgtttcttttttttccgttgaccagaatttctttctgtttttataaccgtaaaagattgtaatttccaggcataaacccaattgggaatgggcatatttatttatatattaataaaaatcatctttttatatagaaaaagacattgaattataagttcaaaagccttaggtaatataggatgtgaaacacacactttttcattagtagaataatatatactagaatttaacccgtggtacaccacggagcaaatattttttcatatataataaaattaatttttatggttttatatttagtattaaagttatataattttatattaatattgtaattaaaaaaattaattatgataaaataataaaataaatatttaacctgtgttatatcaatccaaacccgtctcgctgtatttcatatcaatccaaacccgtcctgctatacttctcgtctcatgatattttaatttttttatgtttaaatattaataatgtttcataaagttaaaatatatcaataatattctttaaaaataataattgtttttgactttaatgtaatgtcattctttgtaaattcttactttactaacacaaaagtactttaaaaaggtacttcaaattttttaatatatataatgttaatttttggtaaaaattattataaaatatttagtttaatcataatttgggattgatatacttggtttttgactaactattttttatttgaataacctaaatttagtcattttgttaatattatttgaatcaacaatatcaacttaatacatgtataatttatttatcccagaaaaaaagaacaaaattattttgtacaattgcaagtttaaaacaaaaaatatggattgagaaataattttgggttttagagttttattacgtaattaattttttaatgaaaatattaaagcatatattgtaatataagatttgattcattttattaactgaaaataaatgatttaaaacgaaaatcagggtgattaatgctaattggaaagatttaaatgtttttgtgatttttttctttagtttcctaaattttagtaacataatagattttatatttagatctaaaaataagtttagtaaaacaataaatgttaatggcatgccattgtaaataaatgtcaagtagaagatttatttgctaaagtggctgcaaaaatatatatgtagatatatatatatatatatatatatatattaatttgaatgacattatatgtagaaaaaataatgatattttattaactttatgtattactagaaaaagtcccacacgatgcgtgggtaaaatataaacgtaataaaatatataatattatataactaatacattttgttttttttttaaaataaattcaataataattagtagaaatattgtaattatgatatattaaactaaaaagttttaggtttcatggattataatctaaaattaaatttttatatattgtttttatcaaattgatcaaaggaaatatatttaaatgttgatatacaatagaaaccttgtgttttatttaaatctatgaaaatcatatgcaaattttctttaacagttagattatgaatttgaaattatatattacatattgattatagtatgtgtgtaaattataagattttcgatagattcaaagttctgagattgacaaagttttgattaattagtaagataaatatttatgaatactgatatattgatactaattgatattaatcgaaagaactctaaatactttattaaatcagtattcaaattatttattccatcattgaacaatatggtaaaaacttatgaatatatatctgtggaatttaataaagaagtttgtagttattttgatgcgcacaaataaatattaaagaaaagttacatagattggataaccaattagggagttattttttaattaatgtgtagttgaaaaaaaaagttgcatgttgacctaaaaagtatatgaattcatattgatgtatacatttcagtaccatgtaataatttataacaaaaatttaaaacacgtatagaattactgaataacagccaataaattatagattggtttaaaagtcaataaatatgacgtaattgatcaaatcaaaaaagcttaggagttcttttttttcaagaatataccaattaattttaaatctaacataagttttcaccaatgatattagtgatagcttatatattttgtataagctcgccattcatcatatcttgtaggctttatatcatcctcatccatttaatttctctctggattacctcatttacccaaaaaaaaagcatagaaaagggagaattacgatggtcactacaagacttaacaaaaatataacgtaaattcaacataataactaaaagataagcactctttcaattattatgatcataaaatgacgccaactcacatatgtacatatgtcaccttcttctaactctcactataattcattgtttactagataaattttctttttctttttttgtttccttgtaaggagtaaaagtatattaaagttttcttacaatccatgaatgtaagaataatgctaaataaaacagtatttcatcttaaacattccactcaaaaccatgcataattaagaccaaaattcgatggatactgaatattgaatatgcatacgtttttcttattaaattggtactgaatattgaatattgaatatgcatatgtatatttaaatgttgatatacaatagaaaccttgtgttttatttatacgtttactgaatattgaatatagttaggaaaaatttggactaacgatacagaaaagaaacgcaaaacatattgggagacagttatcttattaagttattattccgtctgacccaaacaaaactataagaaaaattaacatcatctgatagcttctttacttgattagggagatgtggattagagttttttttttttgaaaacactttatattagatttaactatgaaaataattttcagaagcaatgtgagatgtgaccgtgagattcccgaatgataccatgatggccaacggttttataagtaccataaattgagaacataatacaaacactaaaaacgaatacacacagttgatccatttcctactttttagtctctagacaccaaatatacttactttaacatgtacatgcttcctccacattcagctaaatgtggtttagatgtcttgatagttcgacaagatgctttcatatgtatggcggaagttagaggctttgttcaggttctcaatccttatatcatggtgttggatgctatgcaaattgatcgtatgcaacttttatttgactattagaatctaaaatggtagttctcccttgcaaaaaaaaaaatcattagattctgataagcaagaaaacccaatccctcatcaaaacatgatatagattcataagaagaattttattgtccattttaacttaacattggcgtcggtgttttgctttctcgtccatcaacgaaaaaacaaaaaagagaattatatttgttttgacttcacatctaacatcactggtttatatatgtgtaattatcttcagctcggacaaaaaaatatctaagactagatgacacatatcaaaaagaaaaaatataattaaattgaataaatatagaaaatagtttattttaattttagaggaatgacacatatcgaaataatagagcgccacttgtcatttcttaaagcatgagtttgagaaaaccttactttattatattagactagatgaatacccacactacgcgtgggtttgtttcaaaaattgttaagaacaaattatgttgattgttcttgttgctaatttttgtttacttttttatatgttattgtttagttaataaagttaatcttatgtagttacaatttgtctgattggatttttttacttaaaatatcgatttatacatttatatatatatatatatataattatttatatttctaagatcctaatattttttcactatcatgaatacatacatcgataatataagatttttttatacaattatatgtaattatgttatttgtgtgatgtgaaactcgcctaacatgattataaatataatttcttgttttgtgtactctcctgatctagtacttccatcacatcgtgatagactcattattatatacaggatagacatatattgaataagatctcaagagttttcatatgaaaataagaaaaagaaagcaaaaactaaaatgtcatttaagtcaacatttttatatcgtctactattgcatatagtcatataagagaaaagtcgtgtcttgaattctttggtatgtccaacgtctcaaaggttcatcacttgaaaaaattacagaacttaccaatattaccaacttaccataagacacaaaataaaaaagatagaaagtcatatgttgagtcatatatgaacaacaaaacataataaggagaaagactcaaagtaaaattactaaactaataagtatttatacggtagcaaacaactaaattacaacaataataaaatggttactattgataaaaactttttagtaaaaataagaagaatataaagaaagtagtgctttttattaacataattttgtattttttaaaaaacattttgattaaatcacttaagagaataaccgatggaaaatttaatgttataaagaacttttattttttctcatttaatttggctaatttttaatttaaataatgtagaatgacatatgttatttttttgtataatgatatgacactcatatagagaaaattggccttcgatatatatgatatgatgtttcaaaataagtaagtatatatctatgtacatttaatttgtctcttacttttcaaattttagtaaagatatgatgtaattgctacattcaactaaagatataggcatcatcgtactaaattgttgttactcgtccaaaaaaaaaagggaatgttacactattaggcacttttagaaaatctttttacgtttgaggcactttctaagattcaggcacttttccttgtttctggaagataaaaggacaattatatcctttcaaaattaaaacataaattgcttaaccagttcaattggttttgttttctgtgttatctaataaaacacacgtgtaatacatgttctttctatttcgtgccggttgagatctcgacatgagaaagggagtaatctcacaattacagcaaataaatggatattttttaaaaataaataatatatagtgtcgctcttcatctctaaaaccaaattcttatggaggatcggttctccactatcaccaatcttcatggagatcgtaaacaggtaatttcaaatttcaaattcatttttcaatttaggtttagaattgaatcgaattggagattttgattcaattgattagcaattacagctcaaattagggtttatcatgtgagatctacattgattggattaataagctatctaaaattaggattcttcatgatgttgtttggggaaaattgaaattctgaatagaattagaagttttacagaatcatttgatacaattgtgtagttattgatgaatctctatgtattgtgtattctaaacgttgttttgctttgtgataatttgcaggcaatatttggagtctatgttggtcatggaggagttaaagcggctgagtttgcagctaagaacttagataagaacattgtagaagaagtagttggtaaaagacacgagttggagatagctgaagcggtggaaacgtagttacttgactacagacacaacgtttcttaaggaggaaggttttaagggtggttcatcctgtgtcacggctttggttagcgaagggagccttgttgtgtcaaacgccggtgactgtcgtgctgttatgagtgtaggaggtgtagctaaagttttattttctgatcattgtccgtctagagatgatgaacggaaaagaattgaaaccacgggaggatatgttgatacgtttcacgttgtggagaatccagggatccttagttgtgccaagaggaatcggagatgctcaacttaagaaatgggttatagctgaaccagagacaaagatctcgagagttgagcatgaccatgagttcttaatcttggcatcacatggtttatgggataaggtgagtaaccaagaagcagtagacattgctcgtcccttctgcttacgaaccgagaagccattgttgttagcagcttgtaagaagcttgttgatctctcggcttcacgaggctcgtttgatgatatcagtgtgatgttgatcccattgcgccagttcatatagaaaagagaggcatcttagaagatgttagatatatgacattagaatttctatgatttagtccttttgttttacttaattcactcattccaaggttttttcgagtcattttcaaggtttcatcctcaaaggcgaattcaatagcaagggacattgctaaaagtgtgacaagggatggtcgtttcagatcttatttagctagaggaggccctggatggttactttccagaattgaagaagacaagcgaagatgactttgtgaaattttcttttctttacctttggatttttttttcctttacctttggttattgtttggagttttcatgctctgtttttttatggatgtatgctctatactctgttttgacttttcaattaatattataccagacggcaaaaaaacaattgagtgaacaaagctaaactcaatgtggcttatgttgatcttgtcttgtataaacattgagctttatgatggtgctaagaatttgatcgagttggactccaatgttaatgttgaatgagcaaacaaaaaagtgttaattttatcgagctataaacacattcgcagcaaatcaaagacatacttgtccattaatgaatgtccaagaagtccagtccatatggttatctagtgactcacatggtagtttcatactaatacataagtttatacatgaacaagaaactatccaagcagtctagtccatatggtcatctaataactcacatggtagtttcatactaatacataagtttatacgaggaacaataaacgtcaatccaaagtacattatccattatgaccatttatccacatgtgtatagacagttaagtaacaatgatatgtaaccaagtttcttgatgtgcatctcaggtctcaaagtatactctaacactttacaagtagccatccacaagcgaccatttcgtgttgaccatatatagttatacttgtacggatcaattacaaattgaagaatagttatgatttataaggataaccaaaacccaaaattattaaacttaaatggacaccatcaattgaaaaaaagcgattgaaaaaatagttatttgagttaatagtcgatggaaactattttgggtacaaaagaggaaaccaacatacaaaagtggtcaccaaacctgcaaaagtacattgttcatatggacaatacaaaatggataccacaacattggaaatagaagcatataatgaatttttgggtgttcaattaatctatattggatcatacacttgaaatgattcatttgatatgaatactttggcattgacgagacgttaaatactcaaaaagccatataatttgacagcaaacttagagacaagttcaagtaaagtacgagaggaaggtaaagagaaacgtgtccaaatatcgttgtccacaaagctctgttcatttaacactgctagatcttctcgattggattttaagttttaaatacaagtcaaagtttgattttaaataccaaacatctcaagatataacataaacgatcacaagttcaagggactaatctcttcaccggtgcgaaggtttaataaatacacaattatcaatagtcaatctcgtttcattatctttaatcatgttacgagaatggtgagtccataacacaatccgttacacaaccgtcaattataatttcaaatactaatttgtccataacatatccatgataacaagtccacataaatttgttcacataaacgtcgctttatggaaatataacatagatttcagctaaacaaggaatcatttcctctaaatgtttcctaataatataatctcacaagagatggaggtttcgatttcaatggagacattccagcgattgaagcaaactagtagaaaactttgtcaaattccaactcctaaatatcaccagccatgcttaacaccaaatttagcccagctcgagaaaaaaaaatgtcgaaagtgagacttacgtgaggaagatagataagctgaaagaagaatcttaatctttggtacaaggttcgtactcaagtcgagattcttgagcgatcttggtagcttctcttccatagtattcagtgcaagatttatgatcgccgaagattcgaatcgaggaatatttgcggacgccatatcaaattggataaaccaaagagtatagaacccaacatcacataactttaccttagtaattcaagaactttttctcgaaatctactcaattgaagttgaattagagtaacgaaatccaaatccattaaagaggagattgatatcccgtcgccggagtcgcaagggtataaagtggttgagattacgaaatcgattattggagttttacggtggagagaagaagaaagaaagtagtgtaaaccgtagtggtggtagacagtgacggaggagattgatatcccgtcgtcggagtcaccttttctgaaactgtagtttaggttttttctggatttgttttttttacagttctgggaaaaataaaacgagagattatggtaactgcaaaatcaaaatcgtgggttccgtaaccggaattggtttaatgaaaatgggtttgatttgtttggttatatataaccgacgatttgagggtaaacaagtaattgcaattagtcaaagtgcctaatgatttttaagtgcctaatcatgaactaacttttgaaaaagtgtctaatcacgtaatattctaaaaaaaaatgtatttcacgataacattaaaatatgaagcttatttgtcaagttatcccatatatcacattttattcagacaaaaatctatgaaatctttgatccaacggttaggatccaatggatggtgggagcaacgacatatccttctttgcaaattaatgcgaacttttttttttcctctttaatttattagggatcaaaattgtatatttttcataatacaataaatcacatttctaaatttctgaccaacttcaatctttccagattttgttttccttttttggtgtaaagtaattaatatattactctccccaaatccttaagatttcatttcactttcacctagggttttgctaagcttggtgccgaagtaaatatgagaattgatctttctgttccaaaggtgggggcagagttagaactcaacaaggttctcggaaaaggttcgtctggttcggtgagtctcatcaagtacaagagtcgactcgacggccaaacactttacgccgcggtgaaaacctccaacataattcacgccgactctctcctcaaagagtttcagatcttgtccgaattcaaaggctgttcgagaatcgtccaatgctatgggacaaaagtacaagagacaatcaacgaagaaggtgacgtagagttcacgattcccatggaatatgcatctggaggaagcttgagacattttatgagtagattcaaggacatgaaattgcctgatgctttgatcagaaggtttacgcgtatgatcctcgagggtttagcagttattcatggacacggttatgttcactgcgatctaaaacccgaaaacatccttgttttcccgagtttcgagttaaagatttctgatttcgggttgtctaaaagagaaggagatagtaaatggtggcttcctagtcatccgtttgcgggaacaccggtatatatgtcgcctgaatcgatttctaacggcgaaacaaggagaggtttggatttatggtcattaggatgtgtggtgttggagatgtacactggaaagagaccatggtgggataagaactatgacttgggagatcttaagaaaggttccatgccattgatttcgaaagatattccttgtgatgcaaaactctttgtgatgacttgcttcgcgtcggagactaacaagagaaaaaacgctttcacattgttgaggcattgcttcttgcgtggggatgttaataagatcatagagcctctcgtgaagagtaagaattctaatgatatagcactagagttggagaatattgaacacaggctttcgcaacttaggtgtattagtggtggatagacttacattcttagctcaaaatgctttcagctaactttatataaaaaaatgcaattgttcattgttcgaaatgttgaacttaatcgattttagctgcatttattttacacaaaatctgtcaactactcattaaaattgtttatgtatggtccaggtaaatctaatattcgctcagcttatatgaacctgtcatgtgattttgactcttgccaataaataaaaaaaatcaagtcccaagaaacatcattaagtgccaaattcacatcaaacgtcaatattacacaatcacgagtttacaaagcagagagattatgaagcaaatacataagataattactttccggggacaaagttagtagcgtaagaccaggcgttgttagccacaggatcagccaaatgatcaaataagttctcaatgggacctttaccagtaacaatggcttggacaaagaatccaaacatagagaacatggcaagacgaccgttcttgagctccttcaccttcagctcagagaaagcctctggatcctcagccaagttcaatgggtcgaacgcacctccgggataaagcgggtcaagtccttctccgagtggtccacctccgattctgtagccttcaatgaaccccatgagcacaacttgaacagcccagatggctaagatgctttgcgcgtggatcaagttagggtttccgaggtaatcaagacctccttctgagaaaatctgagagcctgccttgaaccacacggcttctccgaatttaacaccgttcttggagagaatttcagggaatgtgcatccgagagcacccaacatagcccatctgctgtggattacttcaagctcacggttcttagcgaatgtctccgggtcagccgagagtccagcggtgtcccagccgtagtctccggggtattctccagttaagtaagacggtgtgttctccgagaatggtcccaagtacttgggacggtctggtccatacctgttacaaaattatattgcatttggtgattagacagatctaaacaactaaggattacttaagacatataagagggagagaggataaatttggtaccagatgctttggggagtagacttgacggtacgacgcatggtcacacggccaccgcccaagacgcccaccttttggatgaggtcgctggagggcttgagagccgtttggccggcgaaggaggattgttggatagctgatgtggccataatcgtaatctttgtttaactacaatgaaaggaaaggattgaagagagagtgtgagttatgatgggatggtgaaaccaattgggttttataacagagtgattttcatgttaggggattatcaaatgtacacgtcagagggttctgattcgttgaaagagtttagtttagatttcattggtcctatgaggagattggtaatggttgtggtggtgccatctggcaatggaagatcttgtgcttcagtgagaggatagtgtttaacacttattttattggattgttttttggctattctttgtgatgatatatcaataatcctatcttcgattgcgtttctttatcttttatcttaaaccgtgatgactactcgaccagaccggtttgaacataaaatttcaaaccgtgggttttaaaactttaattacaaaacaaaaatgcatgtattatggattggtttaaattaaactatacgatgatatgtactggaggatccagaggtctatgattcttagttgctattagagatgctttgtttcttcactacatattatttcttgcatgattcgctatgtcacactaaatcatatattaaaagccaacacttaccagatcaagaagtcaaactgcaagtaaatagaaaaacacactttatttacagaggaggaaaaatatatttcacagaacattacctaacttaagtaattttccttggctatggctcttacaagagtcacataatggtagagaaagattacatttgctacaaattcgaaccttgtttcttacagagtttttatatatatgggcctcccaaattaggcttaggtcatgagccattacaatgcaaacacagttacaaaattgagaaacccaaacgtataagtcatttagtcagatcgctactatttatatataaaatattacaagagttcataaaataaaccaataattttaatggttcgtcaaataaactaaatattgcaatggttcaattaaacggttgtaatagttttttttaattttaattttaagtaattaaaattttaaaaatatatatgaaaaattataccaagaggtgcgatcgtatatattaaatatatcaaaaattgtaatggttcatcaaataaattaaaaattacaacgactcattaaacaaaacaaaaattgcaataatttataataaactaaatattgcaatagttcaactaaatagttgcaacttgcgaatgattatgaggtgatacaataaaaaaaaaaaccgtagaaattttttattcagattgcagttttctgaaaatgacaaacgacaaatatatatattttagtttaaaaagattgtttaaaagattgtaacaaataaaacacaattgcaacaaacatttattaaaattattattattaggtcatgtttgtttgatcatttggaatttgtatccaaatgatccatccaaataatccatttggatgattcatcttaatgatgtttgtttgatcatttgctagttcatctaaatgcatcatttagatggagctttgtttgtttgatcatttggatggataattcacattctcatcaatatataaatgactaaaatgccttatgttaagtaacaaataatctatagctacattctcatattaatcaaagtagagtttgaaaaagagagtttggctttgatcttcaaattttttcgttgttgatcattcccattttcaaacttcaatttcagattactaaacctgtaaagaaaaaaacacattggcattagattatgaagcaaaaaagatactttgttagatcttaaattgtgctaatgtcagtaagtaatgttcctctatgaatcatcaccaattctccaataagagcaagcatgcatattggctagtactacctaacgattcaaccatgacacattctcaaaagtgattcaatcatgacacaaaatatgaaacagaaaccagagtatggtcttaccaaaatatatcaagtaaccatccatattggctattacttaacctcaatgaatcttaactccaaaactcgatttctcatttactaaatagcgtcttaactccaatttcaaagctaatgtcaggaaagaaacaaacaaacttcatcgatttcctttactctatagtctataccattactcaataccattactattactctataccattactaaaccaaaacactaaagcaaactcatgttaaagacttttgacaaaagacacaatcattatgataaaccaagcttagagaccaaccaatactcacgtgtttcttaaactgttttccattttaacaattatgacaaaccaagcttagagaccagccaaaagtagaggtcacaggataacagagagcttcttaaatcaaactatcattgacaataaagatagtagacaaagcttcttaaactcattcacttaacagttacatatcatcaccagttaaactccttaaaacaataacacactaaacaattcataaacgaaagacacaaagtaaacacaaagttcaatgtcaacaaattcatagcaaaaaacgtgtagatcaaaagaatatatgatgatgacttacagtgattcttctttcaatccttaaatctatatgctcaaatagccaaatctagatcctagctttctgcatcaaaacacacaaaagacctataatcaaagcaacacaactaaagctaatagaataatcaaagcaacacaaatcaatataagcaaaacaaagccgtaaactatagctaagcgaagaatcaaaagcaacacaaagcaacacaaagcaatataaggaacacaaagccgtaaactaaagctaatcgaagaatcaaaagcaacacaaagcaaccaaagcaacacaaagccgtaaactaaagctaatcgaagaatcaaaagcaacacaaagcaagcaaagcaacacaaagccgtaaactaaagctaatcgaagaatcaaagtaacaatgaattcaaaaaacaaagtaaagcaaacccacaattaagcaatgtaaccacggtggatcaaacccaagaacaagtgattgcaacaaggatacaaagagaaacaacgagagagacatggagcgagagagaggaagagagaaagagagagagagagagagagagagagagagagagagagagagagagagagagagagagagagagagagagagagagagagagagagagagagagagagagagagagagagagagagagagagagagagagagagagagagagagagagagagagagagagagagagagagcaacacaaacctgttacactccggcgatggatccgacgagatctccggcgacggcgagatcacattgaccttgacgactatgaatctcgttttttctgttttgtgtcgaggagaagctgaagaagagatgtggtttttggtgtaattccatatacagtagaaactctataaattaataatgctacgaccatgaaattttattaatttatagtgatattaatttatcctataaattaataaatattaattaataagataaattaataaatattaattaataagataaattaataaatattaatttaaagaatatttacgtaaaagataatactaatttttttaaaatgttttttaatttaggttttctcatattttgatgtttgtatattcaattatgttagatactagatggataacccgtgcttcgcccgggtgttaaattttgatatataaatacatgttgctggaagtttgggaatctattgtactatgatgttttaattgtatcatggtatttatttagtttattgtttttttatcttatagttttgtaaataatattaattattataatatagatgtgttggcactcatcattttgtatagaaaattatattagcaaaaggttgaaatagtagaattattaattatagtattggagtatatttgattttatatgcatttatttattggaaggaatgttagatatgtatttagtatagtattatatattataatatatatttgtcaagttttagagaaatgttgtttattacatgttgtaattttattagtaataaagataaggtaaattttattatggagaattataacaatgaaagtgaatttatttctcatgtgtactatatattttaattaagaattttaaaagttgaaaacaaaatctcaaaacaatataaaaacactatgtgatttctaaaatattcataaacaatttattatgtaaaagtttaaaactaatatataattaattattcataacaaaaacaacaaacaacctatttttatgagacttttactaaccaatagaaaaaaagagtgttataatagtcaacaaaattttgtgtacaaaaaaaaaaaaaaaaaaaaattgtcaacaaaacatgctattcgataaaacacgggaatggatcggttgcatcaattttttgacattaagcttctttcaattcgattacagaattcgaatcgatttactgggtttttgatttcaaccaatctattcattttctttcttccattaatcacaaaaattcatcagattttatcaaattcgattgaaatgactccaatggagaaggggaagtgtaatcgtctttcaatttcagaaactggtgattggagtttagtctattggcgttctcttcaaaactgattcatcaattataatttcgttgtttcgtgatgttaaatgtgatattgagaaggtaaacaaatttgaatgaattgtgaatattgaatgttctgtttttcttgatagatttatgcaattgacaaaatacagctgcagcgaattggtcttcaactgcatatcaacgaatgttctaaagttaagagaacatgacaatggatgtttcatggtggcagtcatagaatcgaaaacattcttcacaaagatctcagacaacaacaatggcgaaaaggtacatggttcttaacctttaagcaagtagaaagcctgcatttgtgtgatatggttgatatatagataatttaagtaacaccggttagaatctgtatttgatagtgtaaattattagactgaagtagcaaatgttcaacgaatattgtagatataaaactgacatgataagaatccaacagaagtaaaaaacaaatggaaactaaagattcttaaaaacttctttgtaaacttttttgtttgcttttgtggcttaccttcatcattcacaatcagaatcttcaatcctgactttgatgtaactctggatatggcaacataaagttggctgtgtgaaaagcaaggcctaggtagaaaaatacctactcttttcaaagattgtccttggcttttgttgatagtcattgcaaaacaaacagctaaaggtagttgtgttcttcgcattctaaatggcaattttgtgtctgatggtgttcacttcaatcttggaatcaatactaactgaccagctctgtcaccagttagaatcattgcttgcaaaatgaatggactcatttgcatgatctgtaaccttgtgccattcattagaccacctataggatcaatatttctaagcaacatcacaggagaaccaatctttagacgaagcttatggttagataaccctaaaactttaacattattcaaaaattcaggagtcaacaccggattatttctactaccaatgtcagctgtgtctaaactgtctgaacttagaaatgttaactcctctcctgaaaattaaaatttaggttagttacagttatagaagaaataggaaatataaacactattaatataagtaacttaagtatcaaatcaatgcttctgaattagtaataaccttggagattatcaagcatggtctcatttatttggttgacatcttcgttagtgggacataatattgctctttcttggaaaaaaactggatctttttgttcatgtatcttagtaatatctccatatatctctgtgcatatggcttgtattggatcttttgctttggtaataagaaattcagaaggaatatcgatcaaagcctcaccatcattaggctctccaattctaccgtcacctactgccaatatccactctgaaaactctttaatatctttcgcttcactaacactcaaaccttcagaaaaaagacacatattctttgtcagagtcaatactttgcaatgactccataggtaagatgaattgagggctgccataactatgtctgccgtatcagcaccggggattactggtagaacttgtctgaagtcacctccaaagacaacaaccttgccaccaaacggtttgttatcacaattaccacaaatatctgacaaactcctatccaatgactcaaaacagtgtctgctcatcattggagcttcatcccatataattagagaagcttctttgactaaatttgccctatctgaaccagctttcatattacatgtagtaaactcattaggattaagaggaattccagatctggagtgagctgtcctacctccttctaaaaggagagaagcaataccactggaagcaacgttaagaacaatgtcaccctttgacctaagtgcagcagagagtgttttccaaagaaatgtttttcctgttcctccaaatccataaacaaaaaatactcctccaacgttttcattaactgcaccaataatgttatcgtaaacagacttctgctctaaagtaagctttttaatggaatcggcatgtttttttgtctcactctcgcgatcataccctttctcatccaaaatcaagacattagtatcaaacctaggatctctaggtacttgtggcatagtcttataatatgtaagtgaagtaccattccttcttaaaatgtgatctatctcttgtagagcataaacttttttctcctcatcagacaaaattagatctgtaaacaaacaggtaactaaatgagttacaatttagcaaatcaagtttattattaatattgcattgtataacaaaatgagataaaattgaggttttgaaatgatattagatgttacctggtctgttgaaatatttctttttttcgttttgaatatcttcagagagatgttgccaggtcgcagcccacacattttcaggactaattagagcatctaacataattacgaataactgacgtagataccaaccactgctccaaaaacttgttctctttaaatcatcaatgtattcttgatcattatctaataatcctaatgcctcacaagcatctttccactctttatatagcacaccattaactgtctttagctcttcaaaagatctgggacctggcacaacattgagaagtattctcaaataatatccatcttctatatcacgaggaacatagtttattctacctatagcaaagcctttctttctgagattaaatttcttctcttttggatcatatgtaaatctagtggggatgtttggataagtcagcttcctagcaatctgactaactttattcaattcgaaccaagaaaggaacatggagccatctagatcagccttgtttaacactgtttctacttcttcgtcgcctttgaaataaatatattgttcccctggcaaatggaacgaaagcttcatcacagaagtagatctataatgtataggatattttaatattctccaggctgcttcgcaagcagaaacatatctgaaatacaaaattatacaatcataacgaacataaataaatgtattaaacaggaatcatactattaaaatctcagtttaacatacctgcaattgaaaaagtcttctacttcattcttcttctttggctctgatccatctgtatcagcattgaccttctgtttgcctttttctttatttttcgaatttagagacgaaccaacaacaaccgtaacacgatctggtcctttatgaatatacttgaatatgtatttcacagaacctgattggttacaccactccacgttgatgtgagctctgtatctcagtgatagggatctattataaggaatgacataacggttatcgcatttaaagtctttcttctgaacaaagtcatctattcttcgccttctgtatattggaaatccttctttatcaataattgtttttggaacatgatctttcggataaaactttgaacactttccattttccatacatggacatttcgggttcaccacaccacaaggaccatgaaccatcatttcctttatcacttcaaatagctcagggtctttcaatttgtcaggaatctctgctgatatagctttatcaatgtgctctgctctggtcaacttacattttgaatccagccaaattaggatatgagcatgagggagtcctcttttttgaaactctatagtatacatagctgcaattacacagaaaacataataattattataggtgaaaaaacgtcagatagacataatattccagagtaaatgaaacaaattaaaataggcttacatgtacttgttttccctagaatgtttcttttagttaaatcaagcatcagagaatcaagtttcattttgaagatcttgcatataatctcaggtctatcatcaactctcaaatttcgctcaccacaaaacctaatcagctctggccactttggattgcaagtgaatgtgataaaataatctggaaaaccaaaatgtttacacactgccatcgcatccaaatacatgttcctcatatatctaggaccacctgtaaaagtagctggcaaataacatgctaatccttgatatttcaaatcacactttccttcctctgaagccttttgcacggaattgtaattatctgccctcaaactactctggttaagtttgatgtaaccaagccggtttgattctattgctatataagaatccaccaagaattgctgccatagccttttggacctaagtaaaatatgcttctcatgtttcctttcgtgaattctgaaggcaaaccattgccttatagatatgaacttgttcttcttatctttaccagcccctgtttgatgtttctcaattcctgttctgaatccatcttcaccataagggaacaaaagaggatattgtagaggaagataacacgggagaatttcactaattctttgtagtttccctgatttctcttccactattatatctctgcatggtatatctatagtgaagtctccaggaattaacatggctacctctgatgtcgttggtacattatacaccctgccatcagtttcccgtttactaactattctcatatgcaaagtctcatctggattagcgttgaacctgcccctagcagtccgtaagtgatcaacataaggattgacactatacaacaatttgataacagcatcaataatttcctttctcaactctttctttttgtacttttcagcattagcaccattactggtaagaatcaaataagtcaaatttaaaacagtaacaaaaacaacatcaactttataaaatacaaattagtaacaatataaggaattcactaacctgagtgcttccgatctgttatcaacttcattctctgtgtctacaatatataactgcatgaactttagaggtatatcattgtctgatctcaaactccctatcctatggtagttctctgaaatgtttactgatttcatcgtcattggttagcaatgcataaagtaattctggtgaatttttaagaaaaggcaacttcacttgaccttgcaaacaacatgatgtaaacttgggcttcttattcttaactctcttttcaatacgctcaccatgccacattatagctccacaatattcacatgagtaaataggatcaccatgatcaatgtatattgcattcgaaaaaataaattgttaaatttaaaggctttcctttcaaaataatatatattcatacctgttttgttttttcttgaattcatattaaattgactctcaaactcttcatgttcttttcctgcgaaagataaatgtcagtagagcttatatatttgttacaactttgattgaggattggaacaaagtttcatataattcaatgagaaagttattgaatataacacaccgtaagaatgttcctctatattttcattagaggtacgacatcccggtccaaaagtggcaagtagcctcttctcaagatcatccaaaaactcataattttttttaaccagttcagtaatctcgccatctttttttttttgtagttggtatatagatcataatcaacttcgtcttgaaaaccattttcaagatcatcatgtatattttcctctgaacctaacaaataagaaatttattttgttatacatcacatattatagtatttttaaacagagaagaatatgtaaatgattgcagttatgtttaatatttaccatcagattctccattactgtcacattctcctaaattcatttgatttcctgattgcagaaattcagggaatatgggatcatgtgttctgtctcctcgtccacaatgtgtcaactcatttatctgaagaggaatgtcattggtaaagtttctaaacaatcttttatccttagacgggtttgatgtctctcttcttcaaaagttgttgttgtgaatggagaactaaggtaggaatttggtatatgatttcctgaatataacaaaacgttagatagtataaaaggtgacatgagatgtttcaagtttgtaaaccataacttaccaaagggatactgagaatcatttgcatctgaaggtagattatcatcatatgttaaatgccttcgatatgattgaataggacttgaatgatcgattcctgctgcattgttaacatttcataataaatcttgttaaatctagttatgttatataggtcaacatataaagataaaatatataatatacattgatctgtaaacttaacttgtttttgatgttaaacatgactgcaatgtgccaggcgtttgactaatgcttggtgtatgaactctttgatttgtaatatcacttagaacactattaaaaacagaactaactgccattgatttcttcacacttggtccattgaatgacgatggtgtattttcagatgcttctccatgtctaaaccgcttatcaaatgtgttttgaataacattagacaaatctgaatattgactttcaagaatttttttcctttttgacatggtgaacaaagaaaatgaaatacagcaaaaatgatagctaaacactcataaacttcatcattgagaaatgactgttctataacatgttaacctacttatgtgctcttttatttgctttgcggccataaaagattttaagaatatttactgttatgtcatttaactaaactggttaagattttcactatttatatggaaacagttattaattagttacatgatcgaattgattgatctttatcttatgtaaatatggttattttgttttcttaaaaagaattctattattcaatttataatctatgaagatcttttttctttgtataggatcaactcgaggactacagggaatcattgtggttgtgagagtttcaagtgatatgaattcttctcaagtctataagccattgactacttattttaagtcattaacttcttttttgatttataagaactaagatattaacatttcataggaaatttttggttagatacatagattaatatacataaaattaagcattcttaaaccattacaaaatataatagaatccgaacattaagatagatagaaatgtacaaaaagaacagagtttaacttcaaaaaacaaaaaacaaacgcacaaacttcatcatagttttagttctcatcaacgacctccatcattacatcgtcctcttcatcttcaatcatgtatccgtggctgcatttcaaaatcatcttggcaattagtaattttagcaattacaatatagaactaagaaaaatatgtatacttacagccatgttggtatgtcaatttcctcgaatttaggatcgatgtatagctttgaaaagccccaatcactcatgagaacattattacctgtaatgtttaaacaaagttttctatattaagatgaagacacaatctatagtattacttagaagtaaaattcaaagtaattaccatgataatttgtaattctccagttttggagaacaacaacgataggttcataattgtaagtaatcaagttgattctctttaaccaatggttcacaaaccaatcacatatctgaccaacagcaatacagattacctcgtttcccctattacagaaaactcaataccatcactaataagattatctatggttatattctaagagtataaatagactacgatctatctcataatgaaaatacttacacattgtccgcaatggtgaatttcacatatcttgcttcataatctgtctctcttggacgacatacaaatggaaatctcctaatgttagaaacccattttataatacccattgcatctgaaacatttaatatagagtaagttgtcaggaatatatgacaataaaagtgtgtttcggcataagttacagaaaacagaacatcatatgatctcaaatataaaataatagattaccacaaagaaactccatatcctgcggtgcagcattctcaatatcagacggagccgcaaactcaaaaaccctacttcttgaaagtggaggaacatgccacatggttgtttgtctgagaaacttgatctgtttcgagcaaaatgagtatctaacagacattgtattaacgacaactcgaaagtcggacatgtaataccaaaaaccatcttttagtacatccttgtacttccacagaatggttccttcttgaatagtagcatcaattcgattatactacataaaaatattcaaaatcagtaaatttagaaatctagggtttcgaaatccaccaagtcacagtataaaatatgctaatatataaaattacctttgaatcgatcagcataagcgtggttacaacaccatctcttggtggattgtgatggcagattccaagaatcttcacatagacacgttatttggtgatgtgaacacctatgtcagataaaagatgcatccgctccattgaaattgataacacctatcgcactctaagccagaagaagaatctaagaactgaaaagaagtctgtaaacaaacacacagaattgtctattttatagaagattgaagagttgcaatcattgagaaaacagttctagaacatccaaaaatcgagaaactgaaacgttaaatacattttaatattattaatatataaatataatataagcttccattctttgcttatcatttttgttatttatataaactgaatatattagagagtatattcttagaatgttatggttaagatttaagatattgttatggaatgattatatacatattgatactatcatatgaaattataatttaggcttgtattgttaatttatatgtattacaatttttctttttatgtattaaaacttgatttaaattacttagttcatatgctgagttttttttttcgtgtatacagataaagagctaaagagtggaactcatcatctccatataaggttagatactaagaactcttataatgcataggtatattttctgtaaatattgccacttgattcttatctgcttaaataaaatactaacttgaagattaaaataggaaaaagattaaactgaaataatgtcttccaaaatgaacacaatgtaaaataagtcttagaaactttccaacaatagttcaaaagataaaaccaaaataaacttagaatcatttcagtttgatttttaaaagcaatgtaaattgcttatacaaatgcctctttagacgaatctgactctaagattagtcctgtgtaacatactcgatcctcccatcaacagacccaactggttcatctgcaaagaaattgctttaacaaaaatgtaaaagatgtcaaatttcttgaataacttagtatctaagtcacaaaaacaatagtcgaatgtctttcacatacatgtaacatgatacatcaaagtctgagaaattttcttcaatgaagactcttgaacatccatactcactgattaaggccttagatcctataatatttgttatcattctgttgattagttatatatcacagaatttaacattgtaagtaaagagtataacatattaacatatttcaactaacctttaaacatagaagttctaaagaaccggagcactgtagtgagtggctcatagttgtaaccttttgaaccaataagttgataaaactttgacagaaaagactcacacacagatcctctagcaacacaagttataatcctctcactacaaccaaagaaaatacaaatttatcatactacacatatatgtctattcctaactaatttcaataccaatataagtccatgattgttaacttactgattatctctgatggtaaatgtcacatatctggcctcatagtttgattccccttcaggacagcaatatggaaaactcgacacagttgagacagttgttataactccaatagcatctaacaataacagaacaataagtcagtattaatccaaatattagtactagggaattacaattgcaagaaacgttatactataaaattaagacttaaattaccgactacatgatcgtcagattctccattgacttcatcttgatgaatgaattggagagaactttcttttgctctatcacttacatgccacattttagtgtgccacataaactcaatttcataatgaaaatctgtgtactttggtattgttgttgctctcttcaatcgaaagtgttgaaggtaataccactttccttcaaatagagtagtcttaaaattgttcatatactcgccccaaggtattctagcatcgattctgtttccctgaataaaaagagaaccatataaaattcgttggtaaataagagaaagctcaaaccaaaataacaattcaaatatacatcatagatactaaccttcacgtcacagaggatcatggtacacagagttggtttgttcatagactgcagatcccagatgcttaatattttcacatgtagaacatgattgttcgtgtgtaaatttagatctgggatatagtttctctcggccattggaagttaggatattaattttagcagatttttgtaaaaagatagattgagggaagttaacctaatattgctcttatatatatattgaagtagcacgaggaaagaggaatatagattcactgaatatatatgaaaggtttcttgctatatagattcagtgaatatatatgaaaggtttcttgctatatatccgttcaaatcatttagtgaatataagaatagatactaaccgattctgtagccaatcaccatatataaaagtctttttgctaatgattgctgatatgttaagtagataatgactaaaagaaagtatttggattaagcaaggatataaataatggttgattatggttaaattccaaaacgaatttttaaatattctatcaaaccaagttagttaatacatactaacattgttgccttattcaaatttcaggaatttgaagtcggagaagatagcacaatccattaaggttagatgattcttcttttaatcttgtcattaaagttctatagtgttgtaaaacatttcattttaaaaattgttaaacataaggatgcattagcaaacaactttaaagtagtcacaagaaatccaacttacatcatatgaaaataacatagttcaacaaacatagcatcattgattgcttatacaaatcaatgagcatattacaacttagaaattggaatcaacactctccatgaaaatgtcatcatcctcatcatctgatcctgcaaagttactcctatgaaacagataccaaatacatacgaagttaatgtatatatatacttgtaatggaaattacaatatagggaagaaggctgtaaattacagataattgttcttgtcgattcctcgaaaatttggatcaatgtgaacctttgaacacccataaacacttatcaagcatggttttcctgataaccaaacaaaagaatttgaaaatcataaatatcatgatctcgagatattatcatcatctgaaatctgaaatgattcaaataagaaaagtaccttcaaactctgatattttccagaaacgaagaataatcatcacaggctccatcttaaaattaggttcacttattttcttgtaccattttctttcaaactcttcacaagaacttcctacagcaacacatttgatgtacttgtgcctataatattaagtgtactcagaaaatattaagaatctactaactatctttcgaaataatatagaaagaaaaaaatcttacatagaatctttcaaagtgaacaccaagtatcttgatgcaaagtcactctcccaatctctagcaacccaaggtatcttcccgatgggagatactgattcaattactcccattgcatctgaaattgaacatacaaaggttcaattgttaaatggtattgatcttcatccaaatcttttgtttcaatgaaccgaatatcacttacaaaaaactcaccaacaacaaatttcttttgaataggagctgcgtgtttgatagtatggaaatcaacacactcaatgaaatggtatctactcttaggcgtaacaggttccattgtagtctttttcaaaaactcaatttggaacacatgagtagagaatctttcaagtggattagctacaaccactttgaagtttgagagtatataccattttccttctcttaatgtagaaatcatttcttctttgtatgcatgtcttgaagacttagcatcgattcgatgtccctgagatcatatataaattcatagtgaatctatatggagttttcacaatgataatcatagtctttttaaatatatagagtataaatatatgtaaaaatattgcatggatttaaaatctccaaaagatcaggtaaataacaactgaatacaaaatataactgcaaatagattttcataccttctcatcaactaaaatcatggtaggttcttccccgaagtaattaggaggccaattccacaacctcagtatcttaacaaatacaaaagcacgggtttttttaggacgcaagtcagaaaaggttttgaaattcaacatttccagaagttctctaacgcttgaaaatgttttctctgtacaggaaactgaaagagataaggagagagtctattgatctttccaataaacgtaagttctcaaattttcgaaataaattaaatctgatatgaattttcagagttcaaccaatgaatgattacttttttttgaatttagacagattcttttgagtatttcaagatccattgatcttttagatatatgcataagctatatttcacaatatttattatacatcacatcttactttatattatacacaactacataatatagcttaggtaggaaattaggataccagtcttgaagattattctatagtttcatctgttccaatttaaccttgaaacagatattcacagttgttatgataatgaatctagtataagagtataaatatgtagttgcattctaaaaattaaagtttttcaataaaaaccattgtaaatagaaatacatgtaaaaatataaaattctcttaatacttattaaaaaacttactgaaaaaggtaaaccaaatcagaaattctgacttttattaaatccaaaacaaaataaagaacatgaaaacagaatactaaaatgttattccttgtatctttttgtcttcactttggttaatcctttagtttttgaggctagaggatcgatttcgtcaactactcctgcagtcagtagacttccagcgtcatccttgataattttcaactcatcagcattttctattatcacgttggttccaatctcatcatctccattttctaagttaaccctagagcataacttcttagaagtactcgattgatcaactatatctattaaatcagctgaaccacacttagatgaaggagtacttagttcattattcgtagcatcagaaaagttctcacagctatttgttaacatcaacggaccctaactcacaaaatagagaaatatataagttttagagtacaaaacagcaaagagcatcacaaattgtattaagttgtttagtcatacctgttcctcagaaccaatggttagtggatcatcctgagtgttttcaagcaaacctgattcttctttggttatatctattccaagatgcacctttgtaactttgtgaatatctttgccaccataaatattggctttctcaacacttaccagaaaatggaatgtctttccacacaaattagtgattacatcaggtttgatggtaggatcttcaatctaaaaacatgacggacattatgattagtaatctacattaataacataaacgtatctataccactaagagagtgacaatttgtataacatatacctcttcgtattgtccatctaataactcttcagaagactttctaatgagattggttgcattattttcaaacaccatgagcttaatttcacctgtctgatccattacacgaatatgaagcttgtacctggagtaaagtgaattgtacatatcaaaataatctacactggtaaacctgtttactctattaaagacttctaggagacataattattttatatcttttacaaattataagagtaaatcttaccttgcctcaacatttgtgatgctctcctgatatttgtcacaccaaaacttaggtttcgtaggtgcttggatcctcttaacagtactggttgattctttaaccaactcaatttttctgttacatttaggacatccaaaatagaaccatccccagtcggtatcaatggcaaaaatggaaccaagtattctccactgcccaacctgatttacaatttcaagacaattggttagtacataagctaaacacagtaattgaggatttaattcaattatacttacatctctcccattaagtaaatcaacaattgttttggcaggataatcgaaaaaatcaactgatttagtcttaatgatgtcacggtttacataactgtcctgaatagttagagcaaggccatcacttggtagtctgttaagaagcagatgtttggttaacatgtttgtgaagttaagcagaacaatataagtcataatttaaataaacactcacgatttgacgaacagatccacctcaggaacatgaaccggatggatgatgacatccgaaacatcaaaagcacttgtaatactaatctcacctagttcacagaattagacaatatatgttagacatgcaaatatacatcaattatgatactttagacatatttaagggaagagtggatacttttgaagttattgattttagcatagcgtataaggacaactgtcttctggtcatgcttaacactttttaaagcactgaatactttctcagcaaacacaccccacaaagtgcaagacaaaagctcattgcttcaatatagaaaacatgaacaatattacttcaactgaacaaataactgctatattgcaaaattattgaacacgaactctgaagacttgcctgacatctcttatttgaaactcaagttttttgtttggtttgttttgagcaacaatctcatcaactttaccaacactgaccacttgacctaatatgtctgccattgtaaagattactctgttactattaaaatacataacaaaagatagaatttgagttaaaacatgatagggaatttagaaaatactaaccaattagaacattctcatcataactctcggtcttaatcccttcaaagtccgcaagatcaagaaaaacactatccgatacagaatcacatttactcacttcagtgttgtgcttaaagcccatgggatagctcaaactcgatatcttgtacttgccagtggaaggactcaaattgaagttatcaatgatcttccaatcaccgaccttcaatgacctgtgaaacttgccaatataatgctttctaagagtgacctgcatcttagatccctatatcaaacgaaagaaataaggagaaacattagcatatgttgtaatgaaacttcttgaattaatatagattcatatatataatcaatagcactcaagcatacattttcatcacatatgatgacatctaacgtttctacattatctttggtttgcctccacagatgaagaatcttgactcgcacacgccaattcgttttgaaaggcttgacatcactaagatacgttaagcctaaaggtaaactcattgatcctatgtagactacgacgaaaagtaatccgagttggtttagatttgatgctattgattcaatatttatactaaattaattacagttgaagccctaaaccacacccgaaatttatggtaatggaaatcacaactcaatatctatcgtaatcgaatataggaataatacatgtttggttgtgatcgcagaatatattttcgcaatattgaatatctaggagaagcggcaaaatattgaacttggcaggatcttgaagagaccagttggattcgtcgagttgtaggtaatatccatttaagatatcaatcagagaatattatatctcttacggatttgggaaattcaacttattagttgggatttggagaatattgtagttcttcagagaatatattagagaagagggaaaatcaagatcttctctgtgattttttgaggcgagatttcacgtgttaatgggccaaatgacgcgtgaagaagaaaaaaagaggcccattacgtctaaatgaagatccgcgtgtttctgttcagggtcggattcacggacggcttgggtcggctcaaacgcaggaggaaattgacctttttacccttaattcgtcttttttttttcctataacgtgaaatttaaaaacggcttatgtggcttgtaatttttctgcccctcattctctcttaatagtatagattttattttctttttgatttttttattgtgttcgtatatctacgacgttaacgtggaccttaatccaatttttctttacaaaaatcttagcaatggtttttcatagaaaaaatgttacaaaaccaaatatgatggatcaaatgacaaaaaaatgttacaaaaccaaatatgacaaaaccaaattgacctcgacggcgatgaaccttgttttctctgctttgtgtcgaggagaagctgaagaagagatgtagtttttggtgtaattccatatattagataagggtattattgacattttacaattttggctgaatcagcttcagcagaatgaaccgatcaaactcagtcagattttcttcattctttggatgagtttagaaaaaatcattcaactaaatcatttagatgatctatgaaaaacaaacatcagttttcatcttcattgagatggttcatccaaatgatctatccaaaaaatccatttcgataattcatcttaatgatgtttgtttgacgctagcgactcatgttagcgactcatgttagcgactcaaaaacaactttacttttaattaaatttgaaacgagcgacaagtaacaggttaaagacggtgatcaattaatgatttttcagtcgccgcgttggtattattgatcgccggaaatttcagcgaccagcatcaccttcagcgaatcagcgacataaaatttagaaaagaaattctcttttcaccacaacccatcgacataattaaagaagatacaatgttatttttagtcgttgcaagttgtcgctggcgacaaggaaaagaacatagtcgaacctttttgttttttgcgacttgcgtgattaagaagaaagagagatcacaagatcgaaagaagtatcgagagggaccacaaagttcacaagttcttcgaagaattc

SEQ ID NO: 170 - DNA, 13145 bp, Arabidopsis thaliana
agctatttgttaacatcaacggaccctaactcacaaaatagagaaatatataagttttagagtacaaaacagcaaagagcatcacaaattgtattaagttgtttagtcatacctgttcctcagaaccaatggttagtggatcatcctgagtgttttcaagcaaacctgattcttctttggttatatctattccaagatgcacctttgtaactttgtgaatatctttgccaccataaatattggctttctcaacacttaccagaaaatggaatgtctttccacacaaattagtgattacatcaggtttgatggtaggatcttcaatctaaaaacatgacggacattatgattagtaatctacattaataacataaacgtatctataccactaagagagtgacaatttgtataacatatacctcttcgtattgtccatctaataactcttcagaagactttctaatgagattggttgcattattttcaaacaccatgagcttaatttcacctgtctgatccattacacgaatatgaagcttgtacctggagtaaagtgaattgtacatatcaaaataatctacactggtaaacctgtttactctattaaagacttctaggagacataattattttatatcttttacaaattataagagtaaatcttaccttgcctcaacatttgtgatgctctcctgatatttgtcacaccaaaacttaggtttcgtaggtgcttggatcctcttaacagtactggttgattctttaaccaactcaatttttctgttacatttaggacatccaaaatagaaccatccccagtcggtatcaatggcaaaaatggaaccaagtattctccactgcccaacctgatttacaatttcaagacaattggttagtacataagctaaacacagtaattgaggatttaattcaattatacttacatctctcccattaagtaaatcaacaattgttttggcaggataatcgaaaaaatcaactgatttagtcttaatgatgtcacggtttacataactgtcctgaatagttagagcaaggccatcacttggtagtctgttaagaagcagatgtttggttaacatgtttgtgaagttaagcagaacaatataagtcataatttaaataaacactcacgatttgacgaacagatccacctcaggaacatgaaccggatggatgatgacatccgaaacatcaaaagcacttgtaatactaatctcacctagttcacagaattagacaatatatgttagacatgcaaatatacatcaattatgatactttagacatatttaagggaagagtggatacttttgaagttattgattttagcatagcgtataaggacaactgtcttctggtcatgcttaacactttttaaagcactgaatactttctcagcaaacacaccccacaaagtgcaagacaaaagctcattgcttcaatatagaaaacatgaacaatattacttcaactgaacaaataactgctatattgcaaaattattgaacacgaactctgaagacttgcctgacatctcttatttgaaactcaagttttttgtttggtttgttttgagcaacaatctcatcaactttaccaacactgaccacttgacctaatatgtctgccattgtaaagattactctgttactattaaaatacataacaaaagatagaatttgagttaaaacatgatagggaatttagaaaatactaaccaattagaacattctcatcataactctcggtcttaatcccttcaaagtccgcaagatcaagaaaaacactatccgatacagaatcacatttactcacttcagtgttgtgcttaaagcccatgggatagctcaaactcgatatcttgtacttgccagtggaaggactcaaattgaagttatcaatgatcttccaatcaccgaccttcaatgacctgtgaaacttgccaatataatgctttctaagagtgacctgcatcttagatccctatatcaaacgaaagaaataaggagaaacattagcatatgttgtaatgaaacttcttgaattaatatagattcatatatataatcaatagcactcaagcatacattttcatcacatatgatgacatctaacgtttctacattatctttggtttgcctccacagatgaagaatcttgactcgcacacgccaattcgttttgaaaggcttgacatcactaagatacgttaagcctaaaggtaaactcattgatcctatgtagactacgacgaaaagtaatccgagttggtttagatttgatgctattgattcaatatttatactaaattaattacagttgaagccctaaaccacacccgaaatttatggtaatggaaatcacaactcaatatctatcgtaatcgaatataggaataatacatgtttggttgtgatcgcagaatatattttcgcaatattgaatatctaggagaagcggcaaaatattgaacttggcaggatcttgaagagaccagttggattcgtcgagttgtaggtaatatccatttaagatatcaatcagagaatattatatctcttacggatttgggaaattcaacttattagttgggatttggagaatattgtagttcttcagagaatatattagagaagagggaaaatcaagatcttctctgtgattttttgaggcgagatttcacgtgttaatgggccaaatgacgcgtgaagaagaaaaaaagaggcccattacgtctaaatgaagatccgcgtgtttctgttcagggtcggattcacggacggcttgggtcggctcaaacgcaggaggaaattgacctttttacccttaattcgtcttttttttttcctataacgtgaaatttaaaaacggcttatgtggcttgtaatttttctgcccctcattctctcttaatagtatagattttattttctttttgatttttttattgtgttcgtatatctacgacgttaacgtggaccttaatccaatttttctttacaaaaatcttagcaatggtttttcatagaaaaaatgttacaaaaccaaatatgatggatcaaatgacaaaaaaatgttacaaaaccaaatatgacaaaaccaaattgacctcgacggcgatgaaccttgttttctctgctttgtgtcgaggagaagctgaagaagagatgtagtttttggtgtaattccatatattagataagggtattattgacattttacaattttggctgaatcagcttcagcagaatgaaccgatcaaactcagtcagattttcttcattctttggatgagtttagaaaaaatcattcaactaaatcatttagatgatctatgaaaaacaaacatcagttttcatcttcattgagatggttcatccaaatgatctatccaaaaaatccatttcgataattcatcttaatgatgtttgtttgacgctagcgactcatgttagcgactcatgttagcgactcaaaaacaactttacttttaattaaatttgaaacgagcgacaagtaacaggttaaagacggtgatcaattaatgatttttcagtcgccgcgttggtattattgatcgccggaaatttcagcgaccagcatcaccttcagcgaatcagcgacataaaatttagaaaagaaattctcttttcaccacaacccatcgacataattaaagaagatacaatgttatttttagtcgttgcaagttgtcgctggcgacaaggaaaagaacatagtcgaacctttttgttttttgcgacttgcgtgattaagaagaaagagagatcacaagatcgaaagaagtatcgagagggaccacaaagttcacaagttcttcgaagaattcacagaaataccattgactttatatattttttcaaaaaaaatagaatataaggtttctcttcaacgtgtgcgtgagatgaatgaggaatctaagtaggacgctgatgaagatctcgtagatatcacacgtagagaactaaacatgatattctcaacctgaccagggaagataaagattgcgcgaaaatttaaatctttctcccaaagtggaagatttctttccattattattccttctatgaagactcctaggactgggcaaaatattcgttcgatccgcttcgagttggtattcgatttgatttgattcgaaaaatccgaatatccgtaagattttggaccaaagcaaataggaaaatgtattattcgtaaaaaccgaagcaaataacaaattttgtttttttaaaaaccaaatatccgcttcgatccttatattttgatatatattagaatatatagttatatttatatatatatatatcataaatagtttgtgtattgtcgttactttctgtttttatgttaagatacttgtttggtcatttttctttcatgttatgttttgatcaatgacatcttaaactatcgggttttagtttttagaattagtttgataacatttagttgactggtgataacaacaatagttatgtgtggtatttggaacttgttttgaaaggatgttacataaaaactttgaatatctgatatgattatatagtttacaattttttttaatatttatatttatcaaagcggatatccccaaatatcacaaaaaaatccagatatccgaaaattttcgaaccaaagcaaattacaaaatcaagtattcggttaaaacgaatcgaataacaaatatcataattttttcgaatatccgttccgtgtccaggcctacttttacggataataacagagaacataacagggtggtgtggttcattaaaggttttttctggtgccaaaacaaactcacctgcatctgtgaaacaaaatctttcatcacgattcaaaaaaaagtacccacaaaataaaaatcattaagtaccaaactcacataaaacaccaataagtacattcacgactttacaaagcagagagattatgaagcaaatacataagataattaatttccggggacaaagttagtagcgtaagaccaggcgttgttagccacaggatcagccaaatgatcaaataagttctcaatgggacctttaccagtaacaatggcttggacaaagaatccaaacatagagaacatggcaagacgaccgttcttaagctccttcaccttcagctcagagaaagcctctggatcctcagccaagttcaatgggtcgaacgcacctccggggtaaagcgggtcaagcccttctccgagaggtccacctccgattctgtagccttcaatgaaccccatgagcacaacttgaacagcccagatggctaagatgctttgcgcgtggatcaagttagggtttccgaggtaatcaagacctccttctgagaaaatctgagaacctgccttgaaccacacggcttctccgaatttaacaccgttcttggagagaatctcagggaatgtgcatccgagagcacccaacatagcccatctgctgtggattacttcaagctcacggttcttagcgaatgtctccgggtcagccgagagtccagcggtgtcccagccgtagtctccggggtattctccggttaggtaggacggtgtattctccgagaatggtcctaagtacttgggacggtctggtccgtacctgttacaagatgaatttggtgattagacatatctgaaaagttaatgataggttaggtaagagccagagagagtggatttggtaccagatgctttgaggagtagacttgacggtacgacgcatggtcacacggccaccaccggatacaccaaccttgcggaggagttcgttggagggcttgagagccgtttggccggcgaaggaggattgctggatagctgatgttgccattatcgtaatcttttcgttaactacaatgaaaggaaaggagataagagagagtgtgagttatggatgagatggtgaaaccaatatggttttataacagagaaggcgttcatgttagagggttatcaaatgtacatgtcagtgaattctgattggttgagagagtttaatcgagatttcgaagatttccttggtcctaatagaagattggtagtggctgtggtggtgccatctggcagttgaagatcttgtggtttgtaataagtgacactgatttttaattggattctttgtgatgatgatatctcaatatcttgtattgtgtttacttttttcttctttctttctttttgctaaatatgtgaatcttatcttatataataaagtaaggtttctccaaaattatctctgataaatggttacttggcattctattctttcgacatttgtcattttaaaatttttagtccaatctatttattatcgcaattaataaatttaaatgcattgattttaataagacaatttacatcgtatacattattcttagtttttgggcaaaacatttttcattatatagatatttattttgctaatattatttaaagcaaaaaataaaatatataaagctgtgtgattacaaaataattctttcgacatttgtcactttttaaattttagtccaatctatttatttataacaattaataaatttaaatgcattgactttaacaaagacaatttacacaattatatttttcattattatttttttgggcaaaaatattttcattattttgatacattttttattatttagatctttattttcttaatataattaaaagaaaaaaataaagatatacgaaacttatttgactacaaaattcatcatttaaacatacacattataagattgatgtccaatacttttatttaataaccgttttactttttactttttggctcagttgaaacttatgctattaattatcaataataaattagtggacgtttctattgttcaatttggtttgtattacccaactatgatgcatataaatgactaaaaccctttaaatccttaattttggtaattgcatttactctaaattagtgtgtacaagcatgtttaatttacaaaattaattactccaccttcttctattataaatagtaaatagtaaacattttacttatgtcacatcatactacacaaattgttttatttttgattttgaatgtatatttacaattaaatttgatgtttatatcacctttggttattttattttgtggttgaaaggtttttcatccacatggttttcaaactgcttatagcctattagataccatgtgttgcagtgttgggagtagtgaatatatgaccatattacacgatgatgagtaagatattgcgttggtatgaaggggaagagttggctgtaaaaaaaagaagtaggttgtctaggtgatgaataagttcaggatatgagtcttcaaagccctacgatttaggtcaattctttcattttttgttttaaatttcttacacattttagtcttaattatgttcttttatattcgatatcgaatatatgttcacaacatcattgtttgggtcataatgtgtatgaacttatttgtaatttagatcattttgttaatttatttaatattctttattggtggattacgttacatactcggttgtagttgaaacaatattagattcatgttttgcttttgatttccccaaaacggtttctaaggcgaataattgaagaaaaaccagttatgcttgttaaaacaataaacattagtatagctttagtttttttacctactttttaaatggttttctttaatattaaattatacatatttttttctatttttcttttgttttattttcattaaatttaaaaacttacaacaactaaatttttaaactatatataagatatataaggatttcccattcataaaaataacatacataaagacattaatttttctatattacacatttaaaatcatatatatccatgcatgtaaataatgaatagtgaattgaccataacttatcttatcaatacaattagcaatgtaaacaataaatcatcacttaaaatgtctttttatgtgtgtgtgtgtgtgtgtgaaaactgaaaactgttcaaaaagtatatttttgattggaaaacaaacaagcatcaatacaccataacttagcttattaatataatatgcaatacctaatattttaaatgaaaataaattaattatcacattaatatagttattaattgagaatttattttttggattcaagtctctaagaagcaaacatatgatgatgcagtaaaacatatgtatatatgttatactaattacaagccacaatttagagtaaaaaaatctttcatttaattatctgatatcattttcattatcaaaatttcataaaaaaaatatatttttatttttatttgaatgtctaaagaaacaatgtatcataatgaccatcaatgtgattgtatttttaaagtcagccataaataaattttacttttaaaaaactctttatttgtggtattttgtgaactttccaaaaggtatggtcctctaaaaaaaaaacttatttatcaatttgtattttagggattttcctctataggttttgatttattatttaaataatcatcatacattaatgttttagacctttacttctttaaatatttgaaaaatggtgttagtgaaatttcaatgaaaatgaacccaaataaataaataaaaaactttttcttataattattttcttttttgttcattaaatgtgaaatttttacacgatcgtcatatatataattttaatccatttgaattcaaaaaaacaaacaatataagtttattgaagaaaaatgcatcatatcataccatgatatagaaaaatatcatcattgctttttcgtaaaatttgaaaatcaatattatttttccgaattcttatgtagtgtatcttgaataaataaataacataaatcaaaaaaataaaaataaaataattcagttacttcatatttagttaaaatattacttagtttattatatttatttaaattcacgcaacgcatgagattcctagttttcaatatatgaaaaggcttgtagaagctacaaagttcttaatacaaacagattaatctttgacaaaaaaataatagggactttaatctttctttaatattttactagtgagggttacagattttaagttcttttgaaatcaattatacaaagaaaaaaaatggtcatgttagaagacgaagaagaagaaccttgctcgaaaagaatgcaatcactttccggaattgtatatatcggaaaattacgctgacagaaatggtctgagtggaaactcttgctgggaattagcgatcacttgtcggaaccgagtgattacgaaaagttaataggtaagaggtttgtgtatagaaaaattttattagacaaaagcccaacaatccaacatggcccattcaatctgggtaaatatatttccatggtttattaagtttttatttaaaagtttcttttcatcattttacacatataagaccataattttctatagcattttaccttaccatggtttactatttttttttttttttccttctaataactttattactttcaaaagttgatatcgttgtgtacaagagatgcaaggaagaacggacatgaatgatacaattcccaaaaaattgaagacccaactgctcgtttagctagtctatcggcacatctattttgttggcgaggtttacaactgaagacgacctgtgtaaaagctctttgccaatcccaaattgtttgtaggtagtgctgtagtcgaggagtagattcattgttattcagaagccgggttatgttgcaattgtcaccctcaaacactacgtgacgataacctagggcccatgtagattgtagcgctcatagaagtgccgagcactctgcttcttctgctgagattcgaccctgaaatttgccctgtccacagtccaaacatacaccatcggagttacgaattatccaccctagtcctgagcaacgatcattgaactgatgagacgcatcgtaattgcactttacccagcctctcggtggggtactccatttttgttgacgattaatcatttgagtaggagggcctggtggggaaacaaagtttggtttattgtcaagccattcttagtatcaacgagagcttgctcgaatatctccaaaggggtggtcatcttatgattgaaaagtagattgttacgtcctttccatattctccacatcaaccaaaatgccgggtgagacgatcaaccgatgtatcgttatgtagttgcatgaggtgttgtagcttatcttctagtgacttgttgggatccccgagatagttcgttggaataccacttgctttccaaactgcttgtatttccttgcaagagaaaaaggtatgatcacttgtctctgcttccgtacaacatcgtgagcaatatgggtttacatttatatgtcgaaaacgtaaattttctgcaaccccaatcgctcttgaaccaatcctccaaagaaagtgttttaacttcagaacgatgtctagcttccatacgttcttggcgatatctggaaaatctgccaaaggaggtctcggtgtctcttcatcctcttgaaggttgattgctgtccaatatcccgatttcactgagtattgaccgtttttggatttactccagatatatgaatcaggagtaggtctctggggaagatagatcttataaattaggtggtggtcctctggttgtatcatcttagtaacttgctgctcatcccattgataggtggttgtatcgatgagggtcttgacctccgcctctgcataagtttcatcgcgcagtagtggagcccgcggaggtatggttgggagccatttatcagataaactagcagtttgcccatcaccaatgctaatttggacgttgctggccaatagttctctcccgaatcggaaagaattccagccataagaaggttgtgtcccacggttagtagagaaaaaagttccgtcacgaaagcatctaccttttagtactctgaatagtaaattttgcgatcgttgaagtagtttccaagcttgattcgcaagcaatgcttggttgaacaaatgtagatctctaaaacctagcccgccgcttgtcttggatgtaactaatttgcgccaagctacccacgatattttgcgcttctcgttagttgagccccactagaatctcgccaacatcctgtctatttctgaacacagttcaatcggtagttgaaaacagttcatagagtaaaccggcattgcgtaggcaacaactttgatgagtgtttctttgcctgccgttgataggaactttgtttgccagccctcgatcttctgttgtattctttcctttatgtagtcaagcatttcttttttctttctcccaaattgctccggtagacccaggtatttacctccccctccaatatttggtatttataaagtactcattatactatttctagtatgctggaaaactttattgccaaaagttatagaagatttctctaagttaatcttctgaccggaagcggcttcatactccttaaagatacttaggagatttaagctatttttctgatctgctttgaggaaaaacaaagagtcatcagcaaagaggaggtgcgagatcatgggtcctccattgctcacctgtatgccttgaatctttttctccgcatttgcttgtgtcattaaggaactcaacacatctgaacacaaaataaaaagatatggggacaaagggtctccttgtcgtaaaccgcgacttaattggaaattttcatatgggctgccattaattagaaccgagaaggagactgatctgatgcattccattacccaagttatccattgatgagcaaatcctttcttccgcaacacttcttctaagaaacgccattcaatgcggtcatatgctttactaatgtccgttttaactgacatataggaatttgcgcatcttttccgaacccgcagagaatgtagcacctcatgtgcaatgagcacattatctgtgatgattcttcctggaatgaaagccgcttgattctcggaaacaactgaagagaatacctcttttaatcttttaacgaggatcttggaaatgatcttataagtcacattgcagaggctgatcggtctgaaatcctgcatcagttttggttgtgtgatctttgggatcaagcagagatttgtatgattccagcgggtaggcatgaccccattgacaaagaaattttcgacttctaggataattgttggccccacaatctcccagtaccgttgatagaaagctgcattgaaaccatctggccctggtgctcgagtgccccctatggaaaatacagcctctttgatttcctctatcgtaacacccgctgtcaaaagagcattcatctctcccataaccactttttgaatgtttcgtagtgtaggcactgggtccgtttgcatattgcttgtaaacagacccgaaaagtagtgtgtagcctccgttgcaatagcctgatttccgaaaacttccatccctgaagcatccaatattgaggttaatcgatatcgtgctattctgttttttattgtagcatggaaaaatcatgtgttcccatctccttcatttaaccacatattcctgctcttaattttccaaaaactttcttcatctcgataagcttgaattaactctcgtctgagaccatgaatttgttgaagagttgaagtttgatcggagtgggctgcatcaatggttgtggatagctccttaattcgcagtgcagaatttgtgttattgttgcatttccaggctgagatctctctcctgcaacaaataatccgttcctgcactgtcatgtcttcaatttccccaaatcgattccaactctgttttatcacatcttcaaattccggtattttacaaagtctcgtatcgaactgaaacattttgaaacctttttccgttgttctcttaatcttgatgatggctggtcgatgatcagattcaatcatctccaaatattcaacctgagaggccggaaattgtgctcaccattggtcatttgccatcgctttatctaaccaactttcaactgtatgtgttcttcgtttcccaacccaagtca

SEQ ID NO: 171 - DNA, 124326 bp, Arabidopsis thaliana
gaattccagccataagaaggttgtgtcccacggttagtagagaaaaaagttccgtcacgaaagcatctaccttttagtactctgaatagtaaattttgcgatcgttgaagtagtttccaagcttgattcgcaagcaatgcttggttgaacaaatgtagatctctaaaacctagcccgccgcttgtcttggatgtaactaatttgcgccaagctacccacgatattttgcgcttctcgttagttgagccccactagaatctcgccaacatcctgtctatttctgaacacagttcaatcggtagttgaaaacagttcatagagtaaaccggcattgcgtaggcaacaactttgatgagtgtttctttgcctgccgttgataggaactttgtttgccagccctcgatcttctgttgtattctttcctttatgtagtcaagcatttcttttttctttctcccaaattgctccggtagacccaggtatttacctccccctccaatatttggtatttataaagtactcattatactatttctagtatgctggaaaactttattgccaaaagttatagaagatttctctaagttaatcttctgaccggaagcggcttcatactccttaaagatacttaggagatttaagctatttttctgatctgctttgaggaaaaacaaagagtcatcagcaaagaggaggtgcgagatcatgggtcctccattgctcacctgtatgccttgaatctttttctccgcatttgcttgtgtcattaaggaactcaacacatctgaacacaaaataaaaagatatggggacaaagggtctccttgtcgtaaaccgcgacttaattggaaattttcatatgggctgccattaattagaaccgagaaggagactgatctgatgcattccattacccaagttatccattgatgagcaaatcctttcttccgcaacacttcttctaagaaacgccattcaatgcggtcatatgctttactaatgtccgttttaactgacatataggaatttgcgcatcttttccgaacccgcagagaatgtagcacctcatgtgcaatgagcacattatctgtgatgattcttcctggaatgaaagccgcttgattctcggaaacaactgaagagaatacctcttttaatcttttaacgaggatcttggaaatgatcttataagtcacattgcagaggctgatcggtctgaaatcctgcatcagttttggttgtgtgatctttgggatcaagcagagatttgtatgattccagcgggtaggcatgaccccattgacaaagaaattttcgacttctaggataattgttggccccacaatctcccagtaccgttgatagaaagctgcattgaaaccatctggccctggtgctcgagtgccccctatggaaaatacagcctctttgatttcctctatcgtaacacccgctgtcaaaagagcattcatctctcccataaccactttttgaatgtttcgtagtgtaggcactgggtccgtttgcatattgcttgtaaacagacccgaaaagtagtgtgtagcctccgttgcaatagcctgatttccgaaaacttccatccctgaagcatccaatattgaggttaatcgatatcgtgctattctgttttttattgtagcatggaaaaatcatgtgttcccatctccttcatttaaccacatattcctgctcttaattttccaaaaactttcttcatctcgataagcttgaattaactctcgtctgagaccatgaatttgttgaagagttgaagtttgatcggagtgggctgcatcaatggttgtggatagctccttaattcgcagtgcagaatttgtgttattgttgcatttccaggctgagatctctctcctgcaacaaataatccgttcctgcactgtcatgtcttcaatttccccaaatcgattccaactctgttttatcacatcttcaaattccggtattttacaaagtctcgtatcgaactgaaacattttgaaacctttttccgttgttctcttaatcttgatgatggctggtcgatgatcagattcaatcatctccaaatattcaacctgagaggccggaaattgtgctcaccattggtcatttgccatcgctttatctaaccaactttcaactgtatgtgttcttcgtttcccaacccaagtcatattgttcccttgataaggtaaatcagacactctgcaaacttgagtcatgtttctgaaatcgactagactccaaggttctctcggtctaccacctcttttctcattagcattgagcacttcattaaaatctccacacattaaccatggcccatctcttttaattgctatgcgttgaagtcgttcccataagacatgtctaagttgccgaattggatgcccataaacacaagaaaagtagaaagatatatctttattacttatcttacaatctatgagtcttggatcaacatcattaaaacatacagaaacagattttttccataacaaagctagaccaccaccaattcccaacggtaacacacacttcacatagtcatatcccacttgagctgcaacatcacggacgacatcatcggagttctttgtttcgaccaaaaagagtaagtccggggaataagttgccttaattcccttgaggcgtcgaactaccagggaccgtttaatatccggcagttccaaaaggatgtattcattgcggctccggtggcttattgcccaccgtaccatcaccgttgtttgttggggtagttggagcgtatctcccactgttgtttccttgtgtgaaagcgttctctggtaccaaaaaacagttgcggacttcgactgcttcagattgacgacattcgcgtttgatgacttgatgttctgtctcctctgtagcatacccatgtttcatgtcacaacacacaagtggaaaaacttgaaaattccccgcagaagaagaagatgcctcaggctcgaccttcctcttcttagacgcaggggattcatcatttttcccactatccatgacatgtttatcagcgggtcttgattcctctggtgaactcgcagcaggtgcctctggattatagtctggaccctcatcatcatcatcatcatctgctggtggcggcggtggaatattgttagttgttgggcactttgatgcttcgtgacctatcatcccacatactgaacagaaattcctgagtttctcataacgaaactttaatacgcacgcctcatcaccaaattggaacaagcgttgaaatctcaaagggtcatcgatgttccataaaatgcgaacacaaacgtaatcaaccagaacggccccatcaccaccaaaatcagtctcaaggaaatggcccattcttcctcctatggatgtgatcattctgagcgtgaggaagtggaggggtattcccctgatttgaatccagaacggaatccgcttaaggtcttggtctgtatgatttggattccaacgttgtgtaacacacatccattcattgaaagaccacggtcctctccggagaacagagcccatcgattcctctgatcgaaataagaattggattttcatattttccaggattcgaccagaaacttcatcacctactccccaaaggcgaggcaacgcattaagcaatgcacggagattctgcttccgaggattgacgggcttgacaatgagactgaactgtgtctcagatatcgcctcttcacacaattcaattgggagattgatcgcttcctcttcaattcctagtacaatttcttgcagttgtcgtcggatattgtccatcattattaaaatgaacaaaggaaaaaggaaaacttcactctgatcaacccgagtagaacagagaccatcgcagggtttatataggtttgtattgaaatcagttattgagattacaactgaattacagtttccattccctgaaaaaactgccggcaaccggcgacaaccgctctcagaagagatgaagagacgcgaagctatgaacgccaatagaatcgcctctctctcatgtatagtaagtttacattgccatggtttactattttttctataactaatttactattaaaaaaaaaatttgtcaaatattttacacatacaaaataacaacagtccaaaaatatatctaatttggaagataatgtatgttatttgttatgttgtaatatgaattaaaacaaatttgtctcaaatagtttgtattcaaccgcaatatattacttaagtaaacaactcttctcactttctcaacattagctcatttcagctttattaattgaagttgttagcaaaagaaaaaatgactcaaaacatccaaatttgaacttgttaacttcagcttcagtagtacaattttttttttatttttttttacatcggattcacctttttggccaaattttatcatcactaaaaataatgaagcatgtttatacatatcatctgttatggtcataatcatctactagtactatgagaagcataaacatatataccttttgcaagactctcaaacatttttgattacatggagacgtaataacagtgatgttatagtggaccaaaaaatgaagaagatacatttacatagtgagtctcttgagtcttgacaattgccgaatttttcctaaatagtttcattattgtgatatatcttgaggttaaagtaactctaattatagagaactccatcgaaagaattagtgcttgaactatttgtggagatatcctgcaaatttgacaattctttagtagccaacagctggcaaaagagcctaccataaagacctaactattgcttggacaacttgtggatatatccatccaaattcaagacaaagttggtaatgattattacatgagcagtagcaatcaccaagtaacataagaaagacttaagtgcaatattagcttgtggctcaaagcctaatatagtctcctagtatcaactaatttaacgaccaaaagatcaaccttgaccaaaaaaaagaaaacgaaatgttcaaccatatttctttgtaggaatgaaagaacaatggatttgacatgtgctagagcatattggcatcgtaaggactttttgaaggaaggcacacttggcttttttggtagagtaagtatgaagcctaaatttcttcaaaatttttgaattcttcaagaagtatcttagtagctccatttctcctgcataccctgagagcgcacgtgtccattccacaaacttgtgcgatgataccaaacattgaggcactttagaaaacatcacctttggttctttcttcttcttaccacgaatgcaatactacttaaccaatttctgcaaaaacagaagaaaacaaattgcatagagaaatatacataaaagattttcacaaacaatatgcataaattagaggcttaaagtcattcattatcaatatgagagattctagttttgggcagctttcaagaagggttggcaatattttcatatcagttccagaaaatttagcatccaagctggataggtaacgaaactgatgcatcggttctgattttgagtattaaaagattagaagtaaacaagtaaaaagggaatgttatggtgagaaacttttgtaaaacaatattcatatatatacatatcagcacaaaatttgaggtgtataccttccaaatatcattactaataactagctccttaaccctggatatgtcgctgagaatgtcaggaatcgtgttattgtatgtcgcatggctattatagaaaccaatatctagtttggcagaggaacccaaattgatgatctgaaagttctttggtaaagagacattagccctcaaacactggagtagaggtgcataaatcacaactttagactcatcgatgtagactctctttagagtacgagagcgcacttgtaaaacatttgtcttatcatcattcgaagatctgaggatggttaaatctttcagaagtggagagcctgagataagtttctgcaacgtggtcttgttggggtatctaatatatcgtaaatgcatgatctttagacaaggtaaggaaacaaagtcagcattacacaaggtgacctcacagagtcataagtgtaccagtgtctcaaaggtttataaacacgagggtatctcaccacatcaaaaatattcaacatcaagatgctgaatcctacgcctagccgcaacattaatccatgacgagatatcacatctatcttgacggtaaaaacttaaccgtactttgtgtatcgatgactctatgtgggaattaaggaacctttcaacaaagatgtctccatctttagaagatgtgtaacggactaagtccaattcaagagcaaattgccaaagatgtctccatattgtggacaaaacacttgttttgacagtatccttagtagaaaggtgaaatagtatttcagatatcaaaggttccggtaactggcttatcctaacttcctcatgtgacactttgtcacatattttttgtttcttctttctaccaaccattcttcacacaattaatctgcattacagaaatctaaatccgtttggtagagttcagaaaatttccagttaagccatacattaatactcgccggaatactcaaattttctcatcaattgttaggtttaggggttttcaaggtttctgaagaagactatacgataaacaattaaaaaattaaataaagtagaagaataactcattaatatagagtttaattagcacggcagatcaaaccctccacgcccatgtagcagatgaaccctaacgcaccatcaatccaagtgtcaccactgtgcttgaatttgccttttcgactccttttgacacgatttcaagtgtaaaacgccttgccgtttttcacttccttggtgttgatgaaatggtgtgacgtgttcgtgattcagttttgacttttggtatataactaaattcgaccaactcggttttgttctgtctgaacatattaaaccaacaaacaaagaaccaaaaatcctattggactaaaccggacatccccgtttcactgagattgtaaaaaattgttaatcctgcctttttttttggactcaagttaagtttaatctcgacaagaagttagttcgagagggttgtttgactcttgttgtattgggccgaatcaagcctttgatattggacattcgattagacttatatcaggtctttgattataggctttcttaggtttaagttatgtgtttagggttaatataccttaacttactttaagtgaatatgttcatattattgatgtaagacagctacatacatatatatatactaagttagggtaccttaaccctaaacatataacttaaacctaataaagtccataatcaaagacctgatataagttatcgaaagtccaatatcaaatgcttgattcggcccaatatgttgtgatattgattggagtttggacgattcttggagataacgatattgatgtagtcaaagtccctatcaaagagctctttggatcaaatcagccgtctcttctgttaactaacagtggtgatgataataatggcataagtttggtgacacggagtgtgagtgtcacgggttcatccaaagagaaaggaacattaagcttcacttttagatttcttgtagagcaagttcctcgacaatttattataatcctcggcaatttattataaatttaggatgctacccgattgttcaaccggaagcaaatgttgggaccagaaatggttaaatgcagtcactgtatcaccagtcagatggataccaaaactattcaccaccgcaaatgcaaccgcaaccacaaaattggccatctcaactacaatcgctccactgatacctttggtcaagcttattatcaagagaagtggtgacatggatctcatcaatgagaaagagaaagaccggggacgaaacagaggctttgctgatagaaagacttggagagtactagaggtgttgctgttgaggattcagaaagtataagagggcgagagcaagctcattttggattcatgctttgatgttgtgagagttctttgtgaaactttggccaagcaatgtgcttgaagagagatcaatgctgatctctagaggagattgatgcaatctccttgttattgttcttagagtgtgagtttgggatatcaacaatctatcatccacccgccactactacatacttaatcgcattctcaatcacaaccacaacaatattctccaccacaattccaaaagtaacaacatccaaaattgtaatcactgccacaacaacttctatcaacacaatgagagtcacacacacaaactgcttgtgtctgcggctatgtttgaagagctattatgaaatgatccatagtgtatgtagttcattgtttatagtaatctaacatttctagaaataaatatcgtgagcgcactatcttctaagagcatctccattgcccaactttattttttcctctattttagaggaaatatagttgattttgctccattgtattcctttaaaatagagttacctctaaaatagaggaaaaatgtaaatattgctctatatatagtgtaaaaaagaagactactctatatttttctctattttagagtcatacattggagcaaaatcaacaatatttcctctaaaatagaggggcattggagatggtctaataccatataatttattatctaatatataaatcattttctttaacaaaaaatatatgtaaatcattttcttaaattaacaaacttagaaaacgtgtaatttggaatttcttaaggaattgtatgtttgctacaaggttctacacattatagtcaatttatgtgttatctctcgcgattttgttaagttgcatgcatagctaaatctcggtattgaattttgaggtaaaacggattaaattttgaagtaaaacggattagttgcgagaactaacctcataaaaaacgtgaaatttcttaaaggtcttaaaagtaaaatagagcaatagaatgaataatctcaggaaaaataccacttgaaatcattcaacacaagtatatgagatctagggtatcatcggaggcaaaattctaaagtataattaaaatatatgctaaaattatttaaataataacatacttgtaggtgttaactattgcaaacaaatgaacattcacaataacgcttgttaccgggcagatcattacaagcgcaatttttaggcatcactcttgcagtatgtgcatctaagaagtcaaagaaacacattgtttgtggattacctctgtctgagcatgttccattaaacgcatttgtccaacgacaatactctggttccttcattggttcttctgttggtgcaacatttgattcttttgttttacaagtcacaagcaaatagagtattagtaattatccatacttttttttctcaaccaaaattgtatttttccggtggacaaatatatgcatctaattaagatgtaatgtattgttgttaccatgtgataagtgggcatggataagagagaaaaggacacaagaagccaaaaagattacttcaaccttcatcttgctttgtttctcttttgactatatttttttctcttcttttaaaaattgtatgctatagtttcagctgtaaattcattatatatagctattttctaacttctttgcatctcacattttggaaacacaatgtaaatgtttgaccaattttttttagtcatgttaaagaatattgaccaatttactttgttttggtatatacaacctcttactaataaaaaagcccattgacgcgtctcaagtcatccacattattttttgatattctttctacttgccacatcaacgtcgagaatcatactcatactacaaaattaagattggcccaacatacaaaacctcattagctcaatacccaatattaatcagcccaactgaaaacctacaccccacttcctcatcttcattcccccatttatatattatgtttttatagaggtcaaatttttatattcataacagttgaagataaatgttgaaaatttgactaatatctctattgtatttcatttggaaaaaagtatatttgatatttttttgagaattctttttttttttgttataattgcaatatcaaatgtttaactgtacttaaaaaatttatatgaaaatattaagttttttttttcaaaacacttagacatccaacatttaaataaggtggcttcatcttcattcataatagtggcattgtgatttcagaccaatctttaccttatcgctttttatgattttaaatcgctatttggtttaccgtatttttgttattttcagatgttaatcttttgatacaacatttacatcgtcttgtaaaaaatacataatatactttaaagttgttgtttccaccaactttttggattaaaatcatttgatttaaatgactctcagacattttttttccttctatattatgttatagagttgtagttccacttgagatatatgttacatagtttacatatcattttttttgttaacaacttacatatcacattctgtttattttgttatacaactcaagaatgatataaccactattattattattttatatttttgttaattacatattaattaaaaataactccattattggttgcccaattaggagaggtagtaagttcaaaaaataaaagtctagaataaaaggggaaccgtaaagtaatttcctctctctcttgcgacacgaaaggcgatcgtcaaaacagtttttcttctttgctttttctgggctgccggcatttgccggtggttccagtttgtttaatcagtctagtttgcttctgttttcaataattattatggaagactttcaattatatcagatacttctcaaatatatttacttcatcctattctttttcacctttatgatgatggttgttattttctttgtcggtgatgtagttttcttgggaaatcttttctattcttcggcaacaatctccacatcggaacccatgattcgatgtgatgcagtttttttctcgcatatctacaattacaaattgagatgtcaggatttggtgtcttcacaactattggcacaattcatggtggttaatcaaacatttgaagccaatcaatttgtcacaatgggaagacccacaaattcaaggcgtactgtcgtaccgttacccaaattctggggacaagatctgctttggagaaaacctccatggaaaccaccttggagaaagagacaattcggaaatatatgtgtaatgataataagcaactatctatggaggagaaacagcagagggtttataccatataaacaacattggatttcaagcacaaccaagacaaataaaatctcattctttatgagagtttcgatcaatctgaaaggtgtgcgatgtaacagatggatcgctgcctatgattttcgaatgcgttaccggtatttcatcagtagaaaaaaaagatgattcccaagcaagaaagtcacacaaggttgacagagatgacgaagatgataaagtatttgaataagaacgcggcgcgtaatttgcttcatcttttttcgttacacaaattattggttgtatttgcaatctcattgattgattatgtatactctaattcatattaataaagtttgtttagacggtaaaaaaaaaaaaagtctagaataaaagggctaaacagttttattattaattcttagaagataaattttatcatttttgaattttcatgatttgtttctatactttcacaagaaagtgttactctttcattgtctttgaattaaattttaaaatttaagttgagtttagtaattttttcttaagtgaatatttaataataaagaaaatctctttgtagtatagtgttgttacaaattaatattttactttaaattttatttttctcttaaaacatttagaaacacaattaaataaattgtttttaccatgcattccaattttatgcccatactaaaactcattaacacatttcaaatgtgaagtatgataatttttaattttgtttatgtttaaaagttaaattatattattattactaataaactaataataatatcacttcttctaaaatttcatttctttgatttaattttcttttgtttcactaaaatttctatagattataactaacactaatataaataaatatgaattaaataaacattgtaattagactttaatgtaaaaaacaaaaaaaaatattgactaatgacttgactttgtttaattggatgtttaacacgatgatgtggataccttaacaagagagaaaactttctgattttataccgtggttagtcttggtttttacgtaactttttttttggttcggttattcaatttttgggtctatataaagaaaacaaaattatgaaaaaaacaaggtttcattttggtagattcgatacatcataaagaggtaaactcaaaatcttacaaacatctcagactctcagttcaataagtaactcataaacataaaacaaggttcaatgcaatcatcttcaactaaaactcatttacattgtcactgttacttaaaaagaaattttaattactccattggagatgagaactcttctgctacaataccctcttcttctacacaaccaagcatgattgcagttagcattaatttccctgcctcagcgaaatctttatgactcatcaaaacgtcctctacagaagaagttgaatcctcagggttctctcttctcagaggaaggacttgtgcaaagtcaccatcaaaagtgttgactcgggttggtccgtaacaccttttggaagcctggaaaagggccgtgttccttagattctgtaatgtttcttcctcgctccaaccttcattagtagaggcttgatgatgcctgtcccagtcgtcttgatccgcagcatttctccagcattcttccaaaagactcctatgattctcacggaacgaagagctcgtccatgcaaatacttcgaaagcctttatagctgtccatcgaccctggatattgagacaggtttcaatgagctcctctggtcggaagagccggtttctagcttctccatttggcaaagcttttgttatttcttcctgcaagatataacacggtaacaccggttatagagagtatttacgtagctgagtttaccatcagggtatacaggataaatattaacacagctgagaatatacctgcagcttcagtaagttgagatcagcttcaatgcgcttcactttcgattcggaatcagcatccttatctgcaatgcgaaaattatcatgattttcagaaagaaagacaaagaaacaataacatgtggaataattataccacccatagataattaactagtatacctgccacataggctatctttgaaaggttcagaaaccgcttgcggtctgcgaatgttggttgtacatcttcaggttctggtcccgttctttcttcaacagttgtcatagactcttcatcttgtgatagagccaatgtatgaagagtgtcagacgcagatgagaattgatgaagaaacacctgatgaagccacaccagatcagaatggcgctttagaaatatcaatagctcgtcctggaattcttctccaagccgtagaagcttagagaactgtttcatatcatagagttgctggaaaacaaagtaactgaaccctccttgtggtcccacaccctcgtgctgcacaggaattaagggtattatctaagcaggaacgtagaaaagaagtaatgacaaggtgaaagatgtccaaaagctgccacacacaaaatcatacaaaaaattctctgctgtgcaatctcaagagtaaaacaaccagaagaaatctaacacgtttgagattactagaggaacagggtaagaagaaacctgagaacataccattaagtttctgagcagtcctgtatcattaagatcataacatatcttccacataattttatagcctgcatgtcgctttgcaatggaaatcaaatttgaacaacggtttctgaagatatcttcatctgtcgcttcagttctttctctgatgccctacatatataaaaccaattcatggtgtgattgaacacaaaaatgatatgcagtgcaccacatgcaaagaagtgctaacctggatttctgcttccataaactctttcgcttgtcgataaagagagtcaaaaatagtatcccgccgagtccagtattcattaagcaaacctttgttctcctcttccctctccaattttgcaaaggtagaaccggcacaagcctcaagtaaaacttcagtaagcacttcgagatgcgtgtatatgtctgatttagcagagatatcaatcctagatgcctcagttaacagatgaagcataaaggacgcaatgcaccacagtccattacatacaacagtctgagagtgccaaggtattaaaccttcaagtggtggataccacatttgatgctcgtttttgtaatctaaggcagtctgaagaattgtaacacatgcatttgagagttcgcaggctctctgcagttgagttcctagtggttggtcagctctgattatgtattctagttgcctgttcagacagtaaaacacttcctcaagttcagataccttgctgtagaaaacttcagcattatctctgtccatcaaaagaactgtatttctccgggctctctcccctacaaattgaataagatcccaaagggcacatgaaacttgatcctctgagccagcttgcggcgagccaaatctagctgagcggttttggttaatcatattctgcagttcccggagttgaatcatggcagcaagtttttcaccattttccagaattatttgcaaagaatgtcctgccataaaagagatgcattagctcagttgtcaatttttatgccaaccagaataatttaaccattcacgaagttctttttataaattactatccagttgggggagaaattacttatgaattagagattcatcttcaagcataaaaattctggttttgaccatgtatgcaataatgaagtagaatcatgctacagtaggaagaaaaaacaagtgagagataaaagtgagtactctgtttagaacacagctcctcatggcatttggatagagcaagaaagtgtagaaaattctcatgcttctgttgtttctcaaccaattgtgaagatataacagtcatagctactatctcagcccctctagttgttgtccaatgcttagctaatgtgtcaactatagatttgcttttgcgagcaaaaacattggcctctccatctctatcaaatgcaccagactgactaagcttctccaaggatccatcaactttcccagataacagaaacccctcaaagagctggccaagcaaagcttctgattcctcatcacgggctgtttgacgagtaaaacccattttagggtttcctttgtcttcaatattctgtatgtcagaattctcccttccggcagttctatcaacaccatatggtgttacccttgtctcatctcgtgtagacctctcattggagctatttttgcgtgacagacttctctctggaggttcgactccaccaagcacaactgctttctctggtattgcccacactcctgctttctcagttagtacagtccatgcaccatattcatgttcatcagtggaggaaagaactgaagcatccaaaaccttgccagcatcataaggtaaatcaaacttatagagccgggtagaacttccatgacagtagcaaactgtggctgttccatcacctgaaagaattatagctgaccctgggggtctaccaccaactctgagtctcatagagaataagaagtctttatcctctactcttgcttttgggattatgacttggattggaccttgtttctccagaaccttttcctctctcccatctgcaaatctcatctcagatttatgttgtagggttaaaagcgaatattgtgtatagctagaactgctggcgcggtccatgcagatagtggcaacaagaactgtaatcactttaccctgatcatctacctgcaaatctagaggccaaatctgcttttgactagctatatctttcttgataccagaatcaccatcagtgccaacaatctcatgttgccagacttctgaaacagtcagatcaggataaggctcaatagtaaaacaatgtatgtcacagtctgtcaacataagaaattcccaacacgactctcttgccaatccttgcgaaaaccgccaaatcaaggaccttggatacccctcacttacagaggaagagctaatgttcaactgtacttgattacttttaacgcctgtagggctacaggtaaattgccatagctcaccgttagaactgcaagcaatagcaatacaaagacgctcagctgcagctactgcagtagtaatcaaagaattgagatcgctattttcagctctactgcttctaatcccattgctttgtcgcttaattaaatgacgagccttttctgcctacaggcgaactataaacaacactttcatcagaagatccaagactgataacaggtgcagcttcctgaccagaaaatatgtctgaccaatacacaacagctcgagtttttctattacacataacaacaccaacaggactacgagaccgagaagccctcgtagctgcaccagcagaagtatcccaagatacaacattaaccaaccaacttttcccatcttgtaaaccactaccagactcttcattaaccaaaacaacaacaggaagttcaagaacaacacattttctcgacggtaaagtcgtcaaatgactccatacaaaaactttacttccagtaataaaccaagaaagacaggtctctttatccattccaccggatacacaagcatcacctggagaagacgaataatcaaaaacttaagtatacgttctgaatcatctctactgcttcaatctaatgcaaagaatactaaccaggataactttgttcatcgcgcaacaattgaggaaactctccaacgaatacaggctttaattgatctgaatcaactcctttgtcaccattgtttccaggagaaactctaacaaccatgaacagataaatcaatacaccaaatggaatgacttagaaatgaaaggcaaaattcatcacagtgaggatactatacctagctagaaccgataaacgaggagcccaaggagcaggagttccagtggcgggacgatctgagatgaaattgttccgattttgagttgccggagttactggagaatccggcggagggactcgattgcgtggagttttttcgttgcgtgagctttgcttagctctcttcgtcaatggagagaacattttaaaccaggaagagagcgagaaaaaggggtttagggtttatgtgaagaagatgaagaaagtgtaagtaagagaaatattttgaatcggagaaggtgaatgattcggcgttgatgtccaatttggtttatctaaaatccggttcgagatttgacgatcggttcggtttacgattttgggtaatagatttattttttcatttgggctctgttgtcgtcggcccacgtaaatagtgcagtcagaagaattgattgttttttttttttgataggaatgtgaatatcatattaatgaagaattgattgtttaacatgcgatgtagtaatttgtaaatatttccaaattaaatatttacatatatatttttgatagattttttagccaaaaattcttatattatttattaataatatataaatttttattaattttatttcaaccaaatgttttattcctataaacttataaatctttaatttgcattaaatactagaattaactattttttaaatttttatctttaattaaatctttttttattgaactatattcgataaaagttaattttctaaaatctctatatcgacattaaatataaatatataattttttatcattatatttgtttttatatctaatttattttgattttatatataaaataaaaatagttaataaaatattatatttttctgcatataatgtgattcaaacttttaaaaacagacatataatactcaatcaatgaaaacaaataaatgtacaaggtcttttattgcttaaaactctacatatacatttttggtacacttttggccaaaaaatccttatactatttactaacaacatacaagtctttacaaattttatctcaaatattataatcctaaaaacttacaaatcgttaatttgcgtttgaaatacccaacctcagcagcagagctcgcgagatgacagagaaggcgactgctcgtcgggtaaaatcttgaacacatttcttcaggaagattaaagccagaatacctgattgttagaacacgttgatctccatggtttcttgtgaacacagaaattgtattcgaaaattcacagtagacgcttgcgaacaaagtgatgtcgtctcttcgagcaagcaatgcccggttccgagaaatttataataccaagccggatcgactcttccgttgtagtgagtgaatcaataaagcaatagaaagtgcaaaccaagtcgtgtcccacaacgcgaattgccattttcttgcttcttaccggagcttttcttttcctctgtttcttgtcttgttttgctagatttgttaagaacacaaacaagttaaagaactactctctttattagctttagaaaaccaactcaaaaactaaagctctctttggttctctcaaatctctctcacaaaactcacaagtgttatcacacctcgataactccttatataagagatgatctagtcctaatcctattaggaatatatatttagatatctcctaaatattctctagatctttagaacctatctcaaactctaaaccataactcggtttgagctttaaccatttctcggtttacttctttctcaagcttcctttaagcttaatccaacatcttgctctgctttgtgcgttgttgtttagttttggagaaaacagtaaaaaaaagtaacacgaaactcaagttttataaggaatgaagaagacgtgtgtatttaaaaaaatcacgtcaccatcggtaaattttttttgttcatatggtttttaaggaaaaagggtctattcccccctccccccccccccccgagaaagaactatcgtatcttgctagatagagcccgatctttgacctctgcccaaatgcccatgaaacagaagttatatgtttatttccccaccaattaaaaattcgagagcatgtccatgaatcgtaagttcaagatttaaaaccccatagcactaggtttaatcggtttactgtatactaaatcaatgattttttccatgatcacgaacatgaaccacatacttattttttccatgatccacttcataaatgcctcgtccttgggtatgataaggcctgtaacattttgcatctctttgatcttaactaggttactagccataatatgccgtctttcaaaacagcattgtatgattcaccgatattatatcctctagcaatgcaaccactagtttttctagagtatctttcaaaacagcattgtatgattcaccgatattattttctaccgcagccgactttgtgatatcattaaaaaatgctctacaaaaggagaaaataataaaccgattagatcaactaaaactagagtgacaattgcaaagaacaaaacaagagtcaaaccaaccaaaactagagacaaatactaagacaaaaccagagataaataagagacaattttttttcatacctagaccagttagaaccgacacttcgcttcacttcatcataagcttcaaatgttatggtcttcatcttctcgagctgtttccaaaagactgtttcattatatgcgcgtgcacacttccaaaaaaccttatgcaaaggtcccatctgcttgtgtcttttctgtaagttagcaaaaatgtgtctagcacacattctatgctctgcgtaaggtaggacgtttattatagcagtcccttttgctgatctgaagataatgcaaaaccattaccaagcttcaaacgtaagtcttctcctaataactccataaaccactgccagtagaccttgttctccactggtacaatagcccatgcgatgataaacattgcatcattaggatcccttcccacagcagtcaacaattgtcctttcatgcgtccctttagaaatgttccatccaaatgaattacacgtcgacatgctgtcttccagcctgtttttgagcttcgaagcaagttagaatttctcaaaaaaactatcttttgtacctaaaataaccgttgaacctggattagtctttctcatctcttcaacataatcatacattctcgtaaactgctcagcatactcatcactaatgatgtgtttcataatctgccttgcactctgagatttagtttttatgactcgaagaccatttagatacaaactctacattatttggcaacctgacaagttcgaattagtcctaaactcatttataaaataaacagttatctttggtgcactatagagatccaaaacacctataggataacaactgtgaatttctttgtaagattgaacaaccatttcgtctgaacgacttgttattgatgcatatattctccacttgcaacaatcctgaacacacactccttctattttatttctttcggatctcttaaaatgtatattcaccttctctctaacagcatacttctcaatcgtatcctttctttttttttttttttttcttttttgaatactaggaggttctgggccgaagcccgtaatcccactagaccgaaaccacaacatgtaatattagtttcgtcccaaacgtcaatcgaaccggcgacctctaagctttgtctaggatctttaccaattgaactaacgacacttgatattcgtatcctttcacttctctttagaaacaaactcttgccctacataaaaatctattctagcaccatcatcatctgagtcatcactctcgacataatcatcacggtaaaaatcaagttgctcactctcaggttcctcttcttcctccctttctccaataagaacaccatctagataaggatcatttgccctaacaacatataaattcttgctttccaactcatatgtacacgtaataatttcggcaacatcactatcaccacacaaatccttacgattttgacctacttttctagatgggaagtaagaaaacttactcatattttctgtataaccaacactcaaaatcatacttgtcaacattgctaaactcggatcttcaaaatcaagctgtaagagcatcttcattagaagtatctcaatgagatacccaacaaaaaaaaaaaaattttaaaaaaaagtatgagagaagggagaaaaagtaggagagaaggagagttgagtttctcggaggagaaactttgagaaactattctcatccaatttggacaggtgtcatcatactattagttcaactattaaataataattaatatatttgttttgattaaattattaatatatttttttttgagaaactttctttatttttactgatggagatggtctaaacatcttgtctcaccgccatggtatgaaccatctgctgcccaatctcctccgacatgcaatcgaaagaaaagcgtcctaacaaatacaattatcaaaaactctctaaaaatctgataaatttatgcgtctgaaaacaatttaaaaaattgagagaacaatcttataatagttaccttaaaaagctgagagaaattttcctttaataatcttttcctattcgtttaaattttattttttcagacttttggaaattttatgttctgttgtttaatataataataaaatttacatataaaatgctaataataaattttttgcctttttgttttttgaaattttattttattgaaaactattattttgtatattctaataattatattatacatttttactatttccatatcttgttgaattgaagagatcacttaagactttcatcaccttctaattattattataactatttgtataataataattactatattgagtttataataattgacacgtcataatgtactggatcacgtgcatcgcatgttttagacgagagtatcatatggcaactcgtaagaagaaaagctgaaaccagatcttccttcgttaactgttttcagctccagcttctgaaacaaaatatcatcagggttttatctcaaacaacaacagattatatagtttgtagatacgaggaagatcttggactaacctgctgtttggatcataatagaaaccgcgcgctgatggatccgtcgctgcaggagaagcatacgtagtaaaatctagctattgttagtccacaatctgtgccaacatttacaaagtattgctctttccatctcttgcaccaccacaaaaattatccggagtgaattatataggatatgtaagagtaaaggatcatcgatattgatacgaaagcgagagttataccataaatatataagggtaaatgttatgacctgacactcacagaatcaagaatcgtttcccgtattagaaattcaaagggaaacaacatgaagaaaaataagtaagagtttaaggtcttacaggagtgtctgccatgggaacgtttagagcttccatggtgccacaaagacagccatgttcaaggtcaattccctgtatctggacattaactctccaagcttcctccttgtgttaattagagacattttgcgtaccagaaaatgcatgcagcataaaaacatgtgtgttcctcatctttaggttcaatatgaacaaacaatctcttggagccaatgaatgttatacaatcccaactagatataaatgcacttgaattaagcatagatgtcaacatgaaaaagatatcaagccaatcaaagcagacaaggccaacttctactattagctattcttgtgatttcaagtattcataagtcagaacttgtcaagtctgagagaaatttcaccttttacatataaaaatccctaagacaatgtctttatagatatactcagattctgcttacacataaggttatgttcataaaaagagtgtgcatacataaccacagatgcacaagcataactaataaagttctctctagtcctaaccaatattcccaagacctctatggtcagacacttataaaattcaatttgttaaaccaaataaacagaatcgaaaaccacatctcatcatacccggttcggttttcttaaccgaatcaaattatatataaaacggattaggcttctccggttttctactgcgttttgtataaaaccctcacaaaaaccctttctccaaatccttcaacctctattatcgaacttgctatataacctttggacctgactttcctacttctctctaactccaggtttgtcttcctctcaagttgaagctgcggctttattagtttcctgttgacttatgttccttgaatccattcacatgagcttcttacgccgttttcattggtttacctattgacgttgacttgggtctaccatactttttcatgttacttgattgcatatttataaaacggtgctcctttttgtatagcattctagatgttgcttctgaaacaaagctcatctgctgttcttgtcgttgggaatacaaaaactccagtccttcacacttgtcgctccacctacagagttggaaccagaacgcactcgttcaagagtttgactatggcaaatttgcacaagcacttcttcgtctgggaaactgaatacggcttcatctgtgccttgtagctctcacgaggcttctcctatcaggtacctatgccccctgtattgagtataatggtgtcaaccattcttcttaagtattttctcgattcttgttattttcttggctattgtcagtttcatggacatgagaagttgcatagctgttgtagttaagattgcatcacaccaatataataaagaaactagctgtgtgcttccctgctcgtttctctgttactagacacgaagatttgaaaatagtaagactggttaaggtatttctaatgttcattttctttcctctttgcaagtgagaataacgagaataaacatgtccatggagtttctgagacaattgtgggagttcttggggtggacaattgggtcagtttccatagcatcatttggtatctatattccattggcttttaatttctgaatgctttgaaacttatatcaccaaaatctgttgtatataacctttttatgaaacacttgaacccttcatgaatcttcaaagtatctgactgaatttgtggtgcttgttgtttaccacattgcagagacacctcgtgttggtatcatcatgggttcagacacggatcttcttgttatgaaggatgctgccaaaattctggacatgtttggtgtcacacatgaggtaaatattaagatctgctcgaataattgaactttggcacgacttacatgaatgaattataatccactgaagacagacagaagaaaccttaagtttgtaatttggtaaaactaactgtgaagaagctcaaacatatactgtgcatcttgaatggtccgatatggtatcatttgcttacaggtaaagatagtttctgctcatcgcaccccagagatgatgtatacatatgcaacctcagctcatagtcgaggcgttcaagtcatcattgcaggtgctggtggtgctgctcacttaccaggtatgtctttaacatgcatgaactcatcttgtcacctcccagaagattgttactgtaaaacaaaggactttcttggaaattaggtatggttgcttcactcactcctttgcctgtgattggtgtccctgtccaagctacccgtttggatggagttgattcacttctctccatcgttcaggtacactttcattgcatcataattaacttcagctattggttttttgcaccatttgaaaactatttaggtctgcgattcttaaacctttccatttattcgtttttgttaccaaagatgcctagaggtgttcctgttgcgacagttgcaataaacaatgcgaccaacgcagccttgcttgcagtccggatgttgggaatctctgataatgatcttgtctcaaggttctctttcttatcttttcttttgttacatagagtcagatagaagaagaattagggaaccttaatataaatgagatttgtggattttgatttggttgatcaggatgagacagtaccaagaagacatgagagatgagaacctgaataaaggagagaaacttgagacacaaggttgggaatcatatttgaaccagtgagagtgttactggtcagagcactcattgggaaattggggagtgaaccatcaccattgattttactgctaggaagatcttaaagagtgatatgcctgactggtttaaatgcagcgggtgcggctgcggttgcgggagtttgcggaaacgagcggttgcggtttcaagcgttatcaaacgttctgaacgactggttgagcgtttgataatgggtgcgtttacgggaattttatgactggtaaaccagcgggtgcgataataattaaataaaaaaataaccaaaataaatataatatattactattaaaaaaaatgaaaaaaatctattatataaattgataatattaaaaaaaaatgattttctggccaaataaaaatacaatatatcatctcgtgcgaccaaatgattttctaatcgagaaaacaaatcgaaacatgtattcaatcaaaaacttcaaaagaatacaaaataaaataaaataaaacaataccatgaaatagtcgaagaattacactagctaatgaataaataaaaggatagatgatacttatgtttgattattgattttgattttcatcggatgccataattgagagaatatggttacaatatattgattagggttttctaataaaaataagatatataaaagattagattatttgaattatagtgattagggtttgggtggaagccataattattttaattaattaaaaaaatattattttttttagcctaaacgcttgcgggaaggagcttttgaaaactggcgatttcgagcggtccaaagcgatatctagcggcttctatgattggtgtcaatcgctaccaaccgcaaacgctccgtttacgggtggtagagagagaaccaatcaagcccttagaccatctccaatgtatagttctattcttaggaatattctttttctattttatatattaatatcttttaattatataatttataatttgaccccatatattatagttttggaaaattcacattaaattaaatactaatatatattaaaaaaacattacatcataaaacaataataaaacattacaaattttactttaagcaacaccattaaaatattttgcccacatatgatcgattaaaggacgaaaacaaaattttattttgtgatttgaattcctttcaaaacccaaatgtttgagcatattttgagacggaacaagcacggattttacaaaaacgacgtgtccaacaacaagatcaagaaactcctcctccatctacttcatttgcacaatatatcataatgttatcatcataatgatagctatcatgactatagtatgttgatatgatgatgatgaagatagtatgatgatgatggtgatgataatatgatattatgagagggtaatgatgatgataatattgtgttgataatgaataaattgatgggttgatgaagtcatttgaaaaaagattgattatattcaatcttttttagagattttggttaaactcaaaatgatatcggtttagagatttaagttggtttaattcattttaaccacaataggtgggttctcattgcaacccaactcatttgatctatctaatcatttgacccaataacttatttgaaccatcactcatttgaattaaaaatttcaactcattagagttcatattgaattatatatatatatatatattgttatattaatagatacacaaaacgttaagtacttccttttatatagatttgtatctttaaattgcatatattaatcgtattttttttaaatataattgagtaaattcaaaagcataaattaattggagaaaaaaacataagtaaaactaatggtaaaatttgtaaatatcctaacaaaatttggatgtttaatcaaatagattgagaagttatgtgagaacgacatataagcatggcgttttcgttaatcacccgaaagtataaagttgttttaagaaaatgtttctcaattaatatataagggatattggcaaagagagactataattataattacaaaatctaaccacataattaaaattagaaaatgtaatctcgaggaaaaatctattggcctatgtccaaccaaaataaattattaagggtcaggctgatttaaatacaacgtttgcagttatgaatgcgggagtctgcggaagcggacggttgtagtttcaaatgttatgttacattttgaactactagtttaatggttaaaaattggagcgtttgcaagagttttatgactggttaaccagcaggtgttattacggttaaattaaaaataacaaaaaaatataatatatagtaatacaaagtattaaaatgccaaaaatattatattattatgataaaatgtgaaatttaaatataacgaataataaaatacaattattcctaattattcaaactaattaaattttattttcaaatatgcatttggttcataaagacaaattatcaagtaatatgcaaattacaaacaaaaaaaaaaagaatatgacaaactaaaaaaaatattttcaatttttggatcttccggataaataatattattacaatacagtatcttatcatttttcagtttggtttgatgctatgattttgatagagaaaaacctagcgttttcacgataaaaatcatcaacatatttggaagttttggagaagaagcttacactgaaaaatattacagatgacattgttgatgtattgtgtaaacaaggaaaaaattattacaactaagatgtcatttttgttctttaaggcctaatgaaatttatctctgaggtacggttactctcaaatctccaatgatcaattcgattttcgtccctattttttttgttcttcaatgtgcatctattatcttttttttggttcaaaagcttatttccaaactgaatgaagtcttagccgaaggaaacatcgaggaagaaggtcaatggaagaagaatcttaaagaagagacattaaagatttttgagtttcttcctcaaaatattcaaggatcttatcagatttactaagcgttattgtggatcttaatcaataacgaataatcatttgagtacgttgtatactcctatgaaaaaaaacaaaaattttaattttcaaattctgaaaaacaaacaaacatagtttttagctttttatgtctcttcaacatatgaatcaagtatgcatgtggaagaacaaaatcaaagataataactccatataacatattctaaagaatctaaaatgactttaacttctccagaattagcaccttttaactcttttcacttttatttttaacgactcaatagatgttcataaagcaaaaaattagcttccaaaacttataaaggctatatagatcttactaaaacaaaaatcaacaaatgcattgtgttctcaatcactttctaatgaatctctttttctatatatatatatcatgaatcatgaaaaagaacattcaatacttacatacaacttaacaaaattacattaaaaaaaaagtctactgcttggtgcgggtttcgcccaagtaataataaaaagttatacaagagcgccttcattcattgatgccttgatggcaatatttctaaattttgcggaaaccactttataaatgtttaaatttcaattattattattattattttatatatatacaagaaaacctttttttcttaaaactaaaaaggatatgatacaatgaaatatgatgaagtagcataaaaaaagttgaaaagaaaaagaacaaatagaaaattaaccttcataaaacattccaaatgttattataattattattatacccctttacttaatgtttctcaaactgctcggctctttttgtaaacctgaagctaacagctcttctttgtgtgtttctctgtcactttttatttccttttctttgtggtgttattgctaaagaacctaaaagtctccatgccatcgatcagtctaaaaccgaaagaagataatgaaaaaacaaatctcttttttgccgattgattagatctttggggattccctctaacctttatgctcctatgtttttctctccctttggttaggtatcagtctttctctctatgtaaccgttgaaatctccttccccgaaagggaagaaaacggactctcgggtagattcaggacttgactgtccaacgattcacaatgagttctcctgaataaaaacatcatatatatgattaaatcaagattacaaaaatcacaaaatgtgtttgttaaagatctaaacataccgatcattgtctctgtagttagtggttatgttcatgacattatcttccgtgttcaaatagtccagtaggtagctcaaccgttctgcttgttcctcttgctccgctacaagtaaaaaaatcaagcaactaatagtaaatttctaaacctatgattaccaggtttaagttgaaagtgtaattaccatttgatgttaacttgaagtcatccgaggagaagccgaggtaggagtaattagtaggtaaggacttagaaactgattgttcaggctcactaagaaatggcttcctcattcttgagctctcactaacccgcggtggcactaaaaacaacacaaaagaaaaaccattatacaaaagattaacacacacataaattgattttgttaattacttacatgtgttcatctctatgtctctctcaataaatttagagccatatcgcatgccgtgtagaggcttgtaattgtcgaggtatcgactagagcgtgatttttcccggtaaggcttgactagaacacgtgcattgcaaatgaaatgaggattgcctttagcaagaatgtgtttaactgtttctgaggaagcaaatgttacaaatccatacattcttttctgctggcaaggaatcctcacatcttccacatgtccatatgaggtgaagtagattgagacatcatgttcagtgaaactactctctgccggaaacgttaagtaaatctgtctagaaccagcaaggattgctccatgttcatttctctctccagtgtattccacaaactttgatgcatcctctgctaatataactgaatgttgcccatgaggcctacaaattcaaacactataagaaaacaatactttagattgaaatagaaagagtactattataactaattaacaaacctgtcgacgaggcgaatcgtgttcttcaagcgagcaagaagcttggtgagactatagccagctttgccatgtctttgtgactcagtgagatatccttcagcttgaagagtcctaccgtatttttcgtagtacatcattggcaatgaagctatggagattggagctcctcttcttaacttgagtaactcaatgatctcaccttctagcttctcaagagatacaggggaaacaacatgctcttcgtcacttaggttgttgtttggattaaacatctgagcaaaactctccctctccggtataatctgcccgtggaagtacctacagttgttgccgtgtttgcagaaccctttgttgaagtaatggcagatttttaccgggaactcgggtaaactcggggatcttcggctagttcgcaaaggcaaacattgacgttcttgagagaagaacccgttagagaattcagggctggtcaaaggatcctcaaaattcaagaactgaagattgttctgcaaggtatccatctcggttgaattctcccaaaaaccggttttcatgggaggagaaaccgaaaccgaaagaggcgatgaaccggtgaatgatccaaatttgggagtaggaatgtgatcagaaggagggctgtggtaatgatgagaattcctagctaactcgtatttaacgcaattgatgacagaacacataacagaatcaggacagaacgcgagacggatcatgtcgcggttgccattttcttgcatcaacaagagataaccaaagatctttgctgcattctctggttcaagttgttggattctggcgtgcacaacgttcattgattctgtgaaattcatctctaaaaaacttcttatcttaaaaacttctctgcaaagcaaaatcattcacaaactttcattattattagttccaaaagatttagtcaaaacgatatgaatcaaaagttacataaactacaagttgataccaaaaagaggtagaagagtgatactcactcatgaacccacatgttccatactttacccaaaaaaataaaaattgcattgtaagtcaaaacaaagaaaacaaaatctgcaatgttatggctaagaagaacaatgagcaagatctaaatcaaaattatacacaatcaaaaacaacagtttgaccccacacacaaaaaaaaaaaaaaaaaaaaaaaacattaatcttctaatctcttatacaatgcagacaaatgcaaacaaagttaatgatctttgtacataactgtattgaaaaaaccgaacatgataaactacatttgtcttgaagaagaaatgtttttttttttttcacatggaaacaaaacattcaccaatgattagagagaggatctacgaaaattttaccttggtgaaaaattatccgtcagcaaatgattttccgagaaggattagtcataatctctgttaatccaaaataccagattatagactcaaattatctctcagtgttgttgacgacaatcgtaaaaacatgcaagagaattcttcaaacttttctgaacagaaaaaagaaagaatacaaaaaccataaagaagaatgcattgagatcaatcattgagccaatagagagctgaaaaaaaagaaaacaaaacaactcacattgatagattcattgttgaataaactaaaacataagagcgtgagagccacaaacgaaagagaagaagaagagggcagagtgagaaaacaattaagaaaaaactttaaagagatcgtgcaaatttttaatatatatttgcagagttttagtaactgtaaaacagataagatctcaaagaatcttggatggtggagaagaaaaactaggttaaaatattaattaataacaaatagttttcttgttgcgaagaatattgcataaataaatttttaattttggtttgacaactcgttctattcaatattgttacagcgaatatcgggaatttagttcgaaaaaaacctggagactttagttaattaatggctaatcacgatacgtgtattaataatttttagccgtgggatcgagatgacttttggtggttttgacttttgttattccttttttgagttaatggacggttcagatttcaaacgttgagaatccacgtggcgtccatgttgttgtgtttggataaggataatgcatacaactgtgaccgtttaatagaaacgtaaggtcgcatggtctggttaattggttacggttttggaggaagaggttacggttagggatgaacccggtctacacggaccaatgaagtgatcttagataagtagtatctagtaaaatccggctgatacctgaatccaaatataaacaactgagatatcaataatctcatatagttttatgcattttaatccgcgttacaccgcgggactattttgttttttaagaatcaaaatttaattgtttagtcgattaaaaatatatataatgtaatattttgtattttctgaatgtacaacttttatatctgtatattatttaatatacaattactatgtttgatttttactgttaaaaaatataggaacaataacgtacagttcattaatttaaaatctacgttataactaaataatttaaatttaaattatatttattttattaatattatttgttagattctgacccgcacaattactatgtcatattttttaaaatgtgttgtaataattttttattaaatatatgattattttgttgttttagtagtatatactgtattgaataattataatgtacacataaaaatataaaatattatttatgtttgcttatgacataattataaccataagtctatttttggagtttgaaactgaagagtaaattagaaaaaaaatcttagattgaaatataatataagttagattgatcttaacaaattatttatatagttatagtatatatatatataacctaaactatattagttggttgaaatatttgaaataataatgattttaatagtattttaaaattcttaacaatcaaacggtcgaaccgagaacaaactgaatcaagttaatggtcaggtagatttttattaaacttgtaaactatcaaaccgtatataaaaccattaaaatgattaaatacgtttgcgagaaatataaatatttagatataggcgtaattctcattcaattttatcatgttccattatatcttacatgttctccaatttatatctcataagagaatgtatttctagtataagacaaattttgtattccgattagaaacagaacgtgacggaagcaaaaattcgtttgggacaaacacaaatgtaattcatagtatatttttatatgatatgatataataaaaatattacaaaattaattgacttctttcttcttattgttttatattttgttcataaatattaaattacatttgtttgtttctaaattttaactattatagagcatactataataacatttattattttgaacatttttatgctgtataaattgaaaacacatgttacatatttgattgcaaactaaaatttgcttaaattgtaacttgttgtaatctaaaatttgcttattccatgtcgttcctttttcgcaatttctattctcgttatattacattaaatatcatattccgagttatttttgcttatcgttaaacacaataccaaatacagctgtaacttttggggattaacatatgctttgttaaaatttgtaaacataccataaattaaaacatgaaaacaaattgaaaaaataaatgatctatcaactataatatgtcatactcatacatttgttcatgtgtacgcgcacatatatgaaaacaaaattatatttactatttaatataaataataaacaccgacttgatatattatctcaaatccagaaatcctctggttgatataatatataattaatcaaatatatatttgaatttatttgataaacttgcttaacttcaagaaacgaatcttaacaaaatcataaaactaagagatagtttaatgtgagtaaatttagagaattattttgaactaattgcaaaaactgtgtaaattaaaaaatagcttgtaattagttaaattagtcatcttgatctaaattcaatagtttcttaaatttgcattaaaattaaaacattggtatttaaatttattttaatgttatttcaaaaagaaaataatcaattttagaagaatgtgtattccaaaatcttgtaacaatatgatacaaaataaaataaattatttgatttgaaattgaataatttatctggctctaaataaaataatcttgagatatagaattattataattctttttaaaaatatattaaaaatttgggttagttatatatatttaaaataatgaaactacccgtttaaaaaacaaaaaatatattctaaaactttaaatcattgaaactctaatgaaatgttaaaatattttaatataccttggaaatattttctagatatttagaatccaaaaaataagcttttgaataagctgtattttaaatgatataagtatttcgtttagattatatacgacaaatataataaaaaaaattcatatctgaaaaattataattgaaaaagtcttttttgtcatgtacacaaatgagatttaatcagcatagttttgttaaggaaattattaaatctaaacaaaatgataatttgttattagattgccatattcgaaaatatctaataatatcttacgaaaataatttagttaacatatatgcatttttgaattaaacatacaatatatttgcatgtttaaagatattcctatattttagtagttgttaatttactaaattacccatgcaaaaatttatttacttagttttaaactacccttacaatgttgtagttcacaaaatgcttcctaattaatagtatagataattgtattttgattgttatatctacccttactaatggattcgagtctataaccatgggttccagtgcacgagatcttgtagaccatagcatgttacatgaggaaaaaaaaaacttgtagttgtcacatagctgcccaccaggtataacttctcgtattacaatagacccaaactcgtcttaccacctaatcccgttcagtcaaactaaacatatctaatgaagttcacatgtggtatacagtctcgtattactgactcaaacccgtcctacaatctaacgccgttaagtgaaattaaacatctttttttttgttatttttgttttaataatattttaatttaaaagatatataattcaaatttatttaaaatttttcttttaagtatgttatttaattgttataaattcactgaactgtaatattctaaacccatcccaccatctaatcaagttcggtaaaagtaaacattatattttaatttttggtctagtaatatttttataaaaagatttataattcaaatctatttaaaagttttcttttgaaatggttatttaattttatagatttcatatattatatatattctaaacgttttttcgttaaatattctaaacattttttaaactttaaataactacaatatttatttttaataaagtataatattaataaagttctaagatttctcctttttaaaagtaattagaattgatggagatatattagataaaaaaatactaataattaggaatattaattaattgataataattaatgtcaatgacattccttgtaaataagtcctaactaaaggatttattttacaaaatggctgaaaaatgtatatgtagataaaaaaaaacggtttatatagcgataaaatgtccgtctagattcttatgagttttttgatgtttcaattttagtaaaattaatgaactaaatcggtttaacgattttagctttcagaattggtactaaaaaaatatgacattgtttgaaataaataaaaatgaagaatatatatatatatatatatatatatatttttacaactaagaactttagttttagctgtacaagggtaattggcagaaaactttgaaaactttaaaatcaatatacggtaccaaagaagtggtggcttagagcagccctaatggttggtcccttaattgggctcttccaattttttacccttaaatttggagaatttaaagtttaaaacaggtgtgttgcaagaaagtttttaagaacttataggactaagcattgcaagagacgtttgttctaaaagcatgcaaatagttggtatttatagagtatcatcaacaattttttattattaattttaatgtttgtttattgtttaagttttttttatgatactgataataatctgttttcattggtaagatcagtattggtatcattaaaaaacaaaatttatttgtaaaatcgaaattacatgctagcatcagctactggagcgatagtcgagagcaaataattttttttttctctcattttccacaaaaacgcgtttttccgactaattacaagccgccacgtcattagagactagtatcagaaatatcactccagtgataattctcaagtccaaatcagttgctttgtctattaatttaatattttaggcttatgatacccacaaaaaatctcttctgtacatggtctaagaggtaagaaccaataagaaatgactatgatcgatctttgttatactataataatctattcttttatatatatatatatatatatatatgtgaacaggtacaagctagtatgacaacatgcatttagcaagtaatggagttactgatatcagtttccacagaaaaaaataaagtgtttagaatcgcctatcagttaatttcattttcttttccataaagtctcaaacaataaaaacaaaataccttaactttgttttcgaaaagttaaaatgtttttataactttatattgtggaattgtcagttaatgttttcatatacataatcaatagcctagttaaaatattatcaaacaataagagaagttaatggatggctactcactaatttaggtaactcaattaaaatgactgccaaaaaaataattctacaacagttttacaaaatctaaatttataacaacagatatctaaactaacattaatcaacgtctcagagtagttttcatttcactaacctttaacattatataaggatgtgttaagttctcctaagacgaaatcaatagaagcctcctccatgggaatgttacgctgagattatgcttggcttgtatacattttacatttccaaactcaaattttgtaaaatcagttaatatacaataaaagacgtcaagcctatacctttctctcaaaataaaatgggtaaacagtagctaacatgttcttatcaaataaacaaagtgttattattaacatatcaataactattagaattgccctaggattctaaatagcttagaagatgacactgaaatcccattctttaaaagaatttaactcttaaatgaagcactactgtaaagataatctgctcattaacctgtgacatttatatttctggatagctctattgataagatttctcttccctcttcatagtatagatgttatttgcaaaggttcatcaccttaaacagagacttactactttgcttttaacatactagggcacaactatatggtacattacatatgatatgccttaacttaaacttcctaccagtaagtaaatctgatacacaatagtgttgttttctataaattgatgtctcactaatctgttaaatcgagatttcagaatagctatgatgacgaaatctcagcagctcttccaaagtctcatgttacttccaaacctcattcatctgaataaatatacattgattttcactataacataaaaggacaaatcaatgtgccatatatatgaaacaacttttttgttatatatatatatataaatatgtatatatgaagtatcttaactttaactcaataacaatatcaaaatctacaaatctataaaactaaaattcaaaaatagagataaaaaaaactaaccttaacatatatatttcggaatacctacaatgacaaaaactataaaagaataaatatgattcagtatgaagcttacctcttcatacggttcacgaattataaaaatagaagtataaagcgagttgcagtaacaatttttctatgataatcgcgcaagtgattttttcttcttctagagatattcttcattttgttcggtgaattttttctcttttttgctaataagacaacaaatttctacagatggattatggattgattctaatagcaaggcgggaatcagatggggactttttaacgctcaaggtcgttgccttctcaaaggctccacgtcaatagagccaacaaactcagctttggatatggaggccattgcactacgggaagctctactgcagatgagacgggtcagctatcagaaagtcatattttgagggaactcgcgcatgctatatggtcatttagagtaggtaattcaataacgtcaacctattggggacccttagaaaatccaagaatacattaaggatatagtcgttatgtccaaaaactcttatgcctttctacatgtaaatcgacaagagaaaacagtaacggacacactagctaaaacagttagacatcagaacttggtttgtgttgtctcttggattttttaaatgtatgtcaatgttatatctagtgaacacttcttatactgtgtttccttgattaatggaatatttggccgacaaaaaaacgaaaaacacaaacgaatttcaagacaacatatatttgtccacaaataaacactaacatcaaatggcatatgactaaatggcttcaaaatctgttactattggatctattaaaatatggaacaattcttgggttcaccctttagggggtgaatccattcattcaccgccttttagttgactaatgagaatttgacatgtcatctatttaaaaaataaataatttaatcacaaaatttaaatcttaatcactattttatcaacccaaaccaaaatataatttcgtttaatcacaaaatctaaaccctaacagctattttatcaacccaaaccgaaatataattttgttttaatcacaaaatctaaaccctaaccactattttaacaacccaaaccaaaatataatttcgttttaatcacaaaatataaactgctggaatctgtaagtttaatcacaaatataatgtgaatttaacaagatgttagtttacaattattaaattgtttagttccgtaaaaaattgaacttttaaattttcacatctacacatttaatttctgaaaattttaaaattctcttttgttaactaaataattttttatttggtatataaaaaattataacgttttaaataaaactataaatatttgtattatattacattctattctaaatactattctaaatacatgtctatattgctactataatataaatatactattataatttcataaaacagaaataaatacataatatttttcataaaacaatatataaaaatactattgtattttcactaaataagtgcggattaggatctaatatgcaataaaacctaatttttcctttatacgattaactttataaaatctcagtttataagttaaattaaattttgtaaatttaaaaattgtttataaattcctatgaattgccaaattttattttaaactaaaatttcacatgttaatatagaaaaaaacattaatttttgtatttgttttcatcaaatgcaaatacaagatttctccattgagaccttttcgaccgtaaaccgattgcgatcaaattagctgatctgatcggaaaatcacaagaaaaccctagaaaactcctccggattcgaattctcgactcgattcaatgtatcaattgagaaaatttgacttcttcgaggagaaatacggaggcaagatacctgaggatgtaaccggagatatacaatgttgttccagtggccgtggcaaagtcgtcatcggctctaacgacggatccgtcagcttcctcgatcgcggtgtaaagttcgattccggtttccaagctcactcttcctccgtcctcttccttcaacacctcaaggtatattgatccaatccattcatcaaattttacaattcttctgcaaattgagattgtgtttgttgtttatcaattcatgctcatcgatttcacaattcctgttgattttgatgtttttacgcttgtcgttgtttctttcaatagcaaaggaactttctcgtcaccgtcggagaagatgaacaaatatcgccgcaacagtcagggatgtgtcttaaggtttttgatcttgacaaagttcaggaggaaggtactagttcctcggctcctgaatgcattggtattcttagaattttcaccaatcagtttcctgaagctaaggtaataatctcttccctgttataatacttgacgtatatactgaggtttgatgatggaatatcatgtgtaattgcagattacttcttttctagtcttggaggaagttccaccaatattgcttatagccattggcttagataatggctgcatttattgtgtcaaaggagacattgcacgagagcgtatcactcggtttaagcttcaagtggatggacggtccgctattacaggcttggggttcaggatggatggccaagcgcttctgttgtttgcagtcactccagagtcagtcaacttgtttagtatgcaggcgcagccaccgaaattgcagactttggatcatattgggggcagtgtgaatactgttacaatgagtgaccgctcggtatatacttcgcttcttctgacttgttgattttagaatatgttcttctatatcttctagccagttgaaatatgttgtgttctacaggaattaatagttggtcgacctgaggctgtttacttctatgaagttgatggacgtggtccttgctgggcttttgaaggagagaaaaaattcatggggtggttccgtggctaccttttatgtgtcattgatgattctaaaactgggaacactgtttttaatgtctacgacctcaggaatcggcttatagcatatagcattgtcgttgataaagtctccaacatgctctgcgaatggggaaacataatacttataaaggctgacaaatccttattgtgcattaccgagaaggatatggaaagcaagttagatatgctgttcaagaaaaacctgtacacagtagctattaatcttgtccagagtcaacatgccgatgctgctgctactgccaatgtgatgaggaagtatggagatcatttatatggcaaacaggactttgacgaagctatgttacagtacattaacacaattggttatcttgaaccatcatttgtgatacaaaagtttctggatgcacagaggatctacaatcttactaattacctggagaagttgcatgagaagggtctagcatcaaaagaccacacaactcttttgctaaactgttacactaagttgaaggatgtagaaaagctgaacacgttcattagaaaagaagatggcatcggtgagctcaagtttgatgtggaaacagccattagggtctgtcgtgcagctaattaccatgagcatgcaatgtacgttgcaaaaaaggcaggaaaacatgagtggtatttgaaaattttgcttgaagatcttggaaactacgatgaagccctgcaatatgtttcaagtcttgaacccagtcaagctggggtaacaattgaacagtatggtaagattcttatagagcacaagccaaaagagactattgatatactcatgcgactttgcactgagcaagggattcctaatggtgtgttcctgtccatgttgccatcacctgtggacttcatcactgtgtttgttcagcatccacattcattaatgcattttctcgagagatatgctgaaatagttcaggattctcctgctcaagcagaaatcaataacacactcttggaattatacttgtctagggacttgaattttccatcaatctctctatcagaaaatggtctagataaggacttaatagatcattcggtagcagctgcggtgtctaaagccgatcctgaaaagaagacaaatgctgattcgaaggatgcaatggagaaggattgtacggaaagacaacagaagggactggagttacttaaaatggcatggccgtcagacctagagcaacccctctatgatgttgaccttgctgtaattctttgcgagatgaattcgttcaaggatggacttctgtatctgtatgaaaaaatgaaattttacaaggaggttattgcttgctacatgcagaatcatgatcacgagggactgattgcatgctgcaaaagattaggtgattctagcaagggaggggatccatctctttgggcagatcttctcaagtatttcggtgaaattggagaggactgcaccaaagaggtgaaggaggttctcacttatattgaacgggatgatattttacctcctatcattgttcttcagaccctggcaaagaatccatgcctcacactttctgtcatcaaagactacatagctcggaaacttgagcaagagtcaaaaataattgaagaggaccggcgagctgtagagaagtatcaggttagtgtttcatcattaatttcttgcctgatatttcaagtcaacaagaaaaattgttctcttaatgctgatcctacttcttatcaaaaagccagttgtctatcacaatcctctcccagtgtaaattcctaatcagatttttgaacgatgcaggaaacgactaaaaacatgagaaaagagattgaagatctcaggaccaatgccagaatatttcaacttagcaagtgtactgcttgcactttcacattggatatcccagctgtccatttcatgtgtatgcattcattccatcaacgctgcctcggtgacaacgaaaaagaatgccccgagtgtgctcccgagtacagatctgtgatggaaatgaagagaagtttggagcagaactcgaaagaccaagatctgttcttccagcaagtgaaaggctcgaaggacgggttttctgtgattgcagagtactttgggaaaggaatcatcagcaaaactagagatgcaacatcttaattctcttcacgcctgaaggtaaccactgaactcattgcaaataactcaaaaaagttctcttctctactttgatgtaatcaagtcaactgagaacatatttttacaaaataacgataatctgggagataaattttctcatttagtgaccttgtctgttcagggaaggcggctgaaacatctccaactcaagtgaggccggcataaactttgtggcatctgtgtattctgtgaatgtgaggtatcctttgaatctactttatcggcttagatattgtgtaagagtgagttgtgctagtgaagttgggactggctctatgcttcttcttgtatacatttctgagaatctgtgccatcactcaggaaaagatgcatagatgtcgacaagttattatgtttgtttttttggtgtatgttatggtttttttttttggaacacttagaggagaacgtttgcagtaaatatgttgtggttttgatttgcattcattctggtaaaagtcttgctcatttggaacaatttctaaataattgctcaagttctgtctccggatcaataaattaatatttctatcaaagcatatttttacactatccagtttttctgcttccgggaaacctcggaaatcgaaatgctgggcgagctgtcagcgttgctcccttcgaacacaggcatctactatcttagttaaaggttcgtttttctccattgactctgttctagtggtgaatgtgattacagtttccagcggtttatctttcccttgagatctttattgaaaatcgaaaagtctacacatggctggaacagatgaatttgttgggtttcaaatgctggtagcgacagttttcggttttttattgcttcccggagctatctttttttttttgtgatcagagatcaggagtgccttctgttgaaatagcagcatgatgttgagaagccttgttttttggatgtgtatagcttgtctgatctcaggtttaggacagatgaatcaactacgtcctgtgttatagttgggttgtttcggaatgctcaatcttaaatgttctattatagaccttctccttctgttgtgaaggatacttctactatatatgtatgtgagcttacatacaatctacttttatcggttggaaaccgtctctgcggagattgaagtgaggatcaaggagcctcttcccgagtggatcgattggtagaaaaggagagtccttccttgttcttggttttcgttttggttttggttttggcgtttaaaaactagtaccttccactagggtcatcagatcaatcttccgggtttactttgattcggttaacatcctcagggaaactggaagcactacagagattagaagtagtagcccacagagattcagccctgcgaatctgacaagacgaacttattgtacctccctgatgacgacgaatacaaattcctgaaacggttcaagtatcttaactttagtatctgtctactcgcacaaaagagattctcccttggtttttagattcaatgatgagtataaaaccataacctttgaaaaagagtatttcctttagcttgatctgccaagaggagttatacgaaaattgaacaaggtttggtagagacggatcttcatctaccataaccgcagtcttcgacaatatcagtagagcttatttgcttgctttctccaactactcttgagttttaagatgctttgttacctccaagacgcttctatctcagtggaaagatcagtcttgttcctttctcagaatcgctgtaaacaggttttgtcttgacactttactttcttcactcttatttgactctaatgtcacattacctacactgtgagtcaccttagcaggatttgaactctgaatacttaagttcatgatattatcaatctaatcaagactcacgagtgtcatctttgacctcagttaataatattaagaaaacaagattctagctgtccactatttcacgttcttccagagagaaaacgctttttaaagattaataataaagcatgataagtcatagactatgactcatagtttatattaactgattcttgattatgtttcagctccctcttcactttaagcaacaatggcagcaattctcagcgttgactttcagaactgtttcatcttcatcgtcctatgcctcttctcactcttctgttactctctcttcttcaagaaaccaaagcacccgcgaggctgtgatcttcctcctagccctccttctcttccaatcatcggtcatcttcaccttctcttctctcctctaacccacaagtctcttcagaaactctcctctaagtatggacatctactccatctacggatctttaatgtcccagtcattctcgtctcttcagcctctgttgcctacgagatcttcagggctcatgacgtgaacgtctcctctcgcggtgttgctgcaatcgatgagtccctcctgtttggatcttctggcatcattaccgctccttatggagattactggaagttcatgaagaagctaatcgccactaagctgctccgacctcagtcactcgagagttcacgaggtatccgtggtgaagagctaacgcgattttacaacagccttctcgataaggcgaggatgactgagagcgttgagatcagtactgaagcaatgaagcttgtgaacaacaccttgtgcaggatgagcatgggaagaagtttttcagaggagaacggtgaggcagagaaaatcaggggattagtgggtgaatcttatgccttgaccaagaagatgttcctggcatctttattgcgcaagccgctaaagaagcttcggatctcactattcgagaaggagataatgggtgtttctgacagattagatgagctgctagagagaattcttgtggaacacgaagagaaactacacgaggagcatcaaggtactgatatgatggatgtgttgttggcagcttctggagatgaaaacgcagagtataacatcactaggaatcatatcaagtcatttttcgtggtaaatgttcctcgttaattatgtctattttcatttgaggatccatactaaagacatgttgttcttttcactgcaggagatttttattggagccactgatacctcagtgcaaacaacacaatggacaatggcggagatccttaaccaccctaacgttcttgagagactgaggaaagacattgattccgttgtagggaaaacaaggttgattcatgaaacagatctaccgaacctcccttacttgcaagcggtagtcaaagaagggctaagattgcatccaccgggacctctcttggtaaggacgttccaagaaagatgcaagatcaaaggtttctacataccagagaagacaacactcgttatcaatgcttacgctgttatgagagatcctgattcttgggaagatcctgacgagttcaagccagagaggtttctaagagcacctccaatgggaggctctcttgacaaattcatagagttctcttgattaaaatgattaaaaataattcaaaacaagtgattttgcagagagtcggctttcttgagagagtttttggaattagagagagacgcacacgtggcagacagtttggttgacagaattcaacaaaaagaaggaaaaaaaaaactttcatctcttcgggacagctttcccaaactttctctatgtgcaaatcccagatttttccaattttgttgagtggatccacctcgaaaaaataccgtataagccaacactcctcccattcctctgattcttcttactctgatgcctccaggtccgttccaattttgtgcttctaatgttaaggttgatttgatggaaactggataagaatatcgttaatggaactctatagattggtttaaacagaaactagtttggtttcaattttgaattggagcagctggtttcacatttgaattgttcgttaatgttagggtttagggagatagcaatccaattctgtttttgagctgatattgttttgtaatcgaaaagtgtgagaattaggtttcagttttgccttcttgtgaaatctattggtgagcttaactagctgtattgtggactagaaagcagttgtacaatttacgagagtaacagagtttgcgggaagcctttatcgagatgtgaagcgttgaatgggagaaatctgagtattattattgtggctggagttattggagctgtcatttgattgtgtgtgttggtttagtgatattctggtgtttctttattagagatgtagtaggaataagaatggtcatgatcctcggaaatctaaggatgatagtgattggattggtttgttgacgtggttttttattggttttgtcttcttcatttctttggctataaatattgggttttagacctgaaagatgttctggaaacttgaaagcaagatctttccaaggacataaagatcatcttctagttccttgctggttgatgggaaattgcttccaaagttggctgtttgcaggtttgttaccttccggctctgtcttggtaaattggctataactttcaaactgttaacctaaaccgtgatccgttttttcatgtggtttcgtatgactgttgttgatattcccaccaattttttcaattttctgggttgagttgccactccgtttatgctctgaatcaagacagacgaaaactagagtgaaggtgaaggcaatgcaaaaaaaagccgatgtagagaacgattggcaagaagagctgaaacaaacagcaaagcttttgatgtcgacaaaagtacctagttaattgatctttctttattttctgaaattaagtttttagtgatttgtttttgaatctgaagactgtaaaatacaaatggtattcaacacttgcaagtccattgttacatgttatggtttaatttcttgtgcaccatgttatgagcctgcactattcatccatttcttttgtaccatgttttgagcatgcactattcctccatgtaaccaaataagattaatattatgcaacttcgaagcaaaccgaacctcacaagtcgatttatcatattctactatacctacaaaactcaaagattttatggatatttgaaatcaagttcgttatcgagagatgcatctacaattgaaaggtgatttggttgagcatatatgcaaaacaaattgcaacaatcgacagaacaactgatcgttattccgatttttgttttacacatctattttaaaatgtttcaaaataatgtatgtttaatattttatgatttgcaaataattattaagttatatgaaataaataattttaaaataataatattttttcagagaacctacataagaaagactaccattagagtatgaaaaacaaaaaaaaatacacaaaaactctcttgtaacatttttggaaatttaatcattaaaaaatggagagagcccatagagaggctctctccattggagatgctctaagttcttcaagtgggcaagaagagaaaccgtttaagtaccttccttttggcggcgggaggagaggatgtcctggaggtaatttagcttatatatttgttggaactgcaattggagtgatggtgcagtgctttgactggaaaatcaaaggagataaagtcaacatggaagagacttttgaaggaatgaacctaagcatggttcatccacttaaatgcactccagttcttcgaagccaaccttttttttaatcttacttggttacttctaaactccatgtatactcatctggggaacatgtaataactttgattaatttcttttgttctatagatcttcaaagacattcgattacaaaagtattctaattttgctttctccaaacctaattttcgtagttaatgcaaacctgaaaaaaaaaaccaaaatttaatggaataattttacgaaattgaaaatttaagaacacaatttatatgtaaatgtaattcgggtacatttaattatatttagctataattttattacaaataacatatcttaaataacatagttattagaaaattaattatatttatcaaaagagaaattataatggatatgctcagataaatgaataattaagtatctatccatgaagatttgttatttaggtgggtaagagagaaagtgatgttttgacatttttacccttgtgagaaaaaatgaagaagtttaacgttcatgataattaataagttaacggtgataaacaaattatcatgataaataaataaactaatgcataaattaacatgttacgagaataaataattgataatttattagttaccgaatgttaacatgatacaaataaaaaaaaaatcgttatgtataatagttatctataatatagcatacaatttaccattttaaaagacatgttagagcgataagtaagttggtagtgtataacttaactgtaataattaaattactaaaataaataaatatattattgtataatacatattatataataaatgatttaacacgagaaatatgttttcgacgtaagatgaatagtattttcactttgctactgttttttaaagatatgtttatcatactaatcaaataattaactatctaaacttgttaccgctaaaattcatttttttgttgttgcatataatgagtttatcttgatatttttctttttaacgtgtgtatgtgacaaagggtatttttggtattaatctgagacagatgaaagagaactaaataacaaatctttatagtcaaatacttaattattcattcttctaagcatagatcacccttatcaaaattatatatatatatatttacaaaatttggccaaaatttagtaaggttaaactaatttttatttaaattaaacaattttttaagttttttttccgaaaaacgatgcaaaataatcaaattctgacatctatccgaaccgaaaccgagcataatagttataaaatccgaacggataataaattatctttacctaaatcatctgaatacgaataaatctaaatgtctagacttagatagcggtatgtttttttggcatggtcaatgcattctcatctttcaaaattcaaatcattgatcaacatttacttcatgtactgtgtaaaataaatgacaacatgcgaagtttatgtataagagcatctccaatggtgtaaaaatggagctctcttcatacgttctctgttttcaaattgaatctctcttcaaagagatttttgaaaacgaagagagactattacgtgtcacgttatgattggccggaatttttggcaaaacaagaagaaaagaaaaacgattctttgacaaaaagaggattcctcacttctttctctcatctccaacaatgattccaataattacatatccgatttgaccaagtgtgcttgttcctcccctcttccttaccataggatgtatttgtgaaataactttgaatgaaaatttcattcccgattctacgagaattaaccatgatgttgatcactgtccctatttggcgcctcagggagtaaacaataacgaagttgctcatgccgttgatgatgaagtggatgttctggtagtacctgtttggggagaaggcgagggttcgaacaaccctactcctccaccgcctgtgaatcaatcttcaagttctgatatttcttctcacaggcctatttctcaggcaccaatctcttcttcaccggtccttgatctgaatgttcctgcggtggaacatcatcaatccagtcttccttcattgagtgttaaatccctttctgaggattctaccactctcagtgttcttcatgctcacacaagatatgagactggtgaaagttctaaacgcaaaaaaggaaaagagattgaccacactcgtaacaagaaaaagcagcaattccgtaaagaatatggggttaggttttatccggtctctgaaaaacctccatagttctgctgaggtcttgatcctcagagtataatctgcccttatactctgtgaaaacaactttttggggtaaggtttgttttaagtctgtttcatagttactttggaacatagctctttggtttcaagatgcttttggatgtttttggatgcacaataacttttggctgctacaaggttcttttagctgtaattctcagtgttgtagtgtgctgggtcaaaattgaagattgctaggacttcttcacagttctactaagaccatgtacatgggtgatatttctacagtatcacaagtccaaaaattatttttatattgacaaaacaattagaatgaggttcatgagtatcagcccagagatatttatgataccagtatcatctgacgtgacatctcctgattggtcacatttgccaaaaaaaatatatatatatctattaaacaaatattataaataatgctaaaaaattcttaatgatattttatgagtatcacatatgatcatgctctaatagtctctggtttcctgatactttggtgagcaagaggctgtcatgacatacacataagttggatgctgtaagttcagaggcgaaacatgtttctcgttttcttgattttattgttgagtcatgatgattgccctacaacactgctgccaagtatgatcatcgtcgttatagagtatgtaaacttcaagagatactttatatatagagtatgtaaacttcaaatataaagtatgagtagtttcttctccaagagtatactttaaatatgaagtttctaaaatgtgtgttttgcattatactccttatattgtttttaactattttaaaaccatataacttttataaataactctaaaacatacattaaaatattacagataatcttaattaacaaaacaatgcatttataaataaaaatatatataaataaaaatgaaaaatgcataaattaacttataaattacaaattattcaataaaattattttcgtaatgcttccatatatgatcaatcaatgcattacgaagagaaaaatgagtctctttatttttaatctgtagattacgagccaaaaattgttgaaatactttgaatatataaaaattaaaggactaaaatgataaacatagtaatttgtaagattatttatgaaacattgaattttagggacttaaatgcaaataaaaaagatgaaacttcaaatttagagtattgaatagtgatactccaaatatagagtgtcactattcaatactctaagagcatctccaagagatactctatcccctcaaatataaagttttaggttctccaagagatactccaatacttcataatttagagtattgaatagtgacactatatttggagtatcactattcaatactctaaatttgaagtttcatctttttatttgcatttaagtccctaaaattcaatgtttcataaataatcgtacaaattactatgtttatcatttgagaatattacgtaattagacactttttggaaacttaatgccgattaaggcactttaaaaagattgggcacttttctaagccaaattgtccaatttgcccttctaactataacttcctctcgtgataatattttttgacttatatctctcattcttctctctcttctctttcttttttctcactttatcgaaaaataaacaaaatcaagcagaacaaaaaaacaacttttctcattattttgctatttctttatcttctcatcacaagtcaattcaccaattcgttctcctattttgatcttctcgaattcctatggtttcattggaatctgagattcagtttcggctaattgaatgtactcgcttcattagtcaagttttggcactggtggagtacaaaaacggcaggtgtgtaaatgacgaaagcgagtacatttaacgacagaagaaacagccagtgattcgcgacaggagatttgggtctagatctaaaagtcattactttattcgatgtctcttcttagttgtttctccaacggatttgttatggtttcttgcgacggttgtcttttatatggtgatgaagtgtctgttggttggtggaggcgatcgagttgttggtggcgactgaagcgatcgagttaatgaaatccttgacaactctgaaaagagaggtggtcctccacgcgaccaaggatcttttattgattttcgcagttttatctcaaaaaatggattatgggacctaaaatattctggaaaccctttctcgtggcggggaatgagatatgattggtttgttcgccaacgattagaccgtgcaatgtccaacaattcttggctggaaagcttcccctctggaagatctgagtatcttcgttttgaaggttctgaccacagacctttagtggtgttcgttgacgaagctagagttaagcggagaggacagtttcgttttgataacagactcagagataatgacgttgtcaatgcccttattcaggaaacttggacaaacgcaggagatgcttctgttctcaccaagatgaatcaatgtcgtagggagataattaattggacaagactccaaaatctcaactctgctgaattgatagagaaaacccaaaaagctttagaagaagctctcacagctgaccctcctaatccaactaccataggagccctcactgcgacgttagaacatgcttacaagttagaagagcagttttggaagcaacgaagtcgagttttgtggttgcatagtggtgatcgaaacaccggctactttcatgcagttaccaggaataggagaacgcaaaatcgcctcactgtgatggaggatatcaatggtgttgcacagcatgaggaacaccaaatttcccagattatatcgggctatttccaacaaattttcacttctgagtctgatggtgatttttcagtggtcgatgaagctattgaacccatggtttcgcagggagacaacgactttctaactagaatcccaaatgatgaagaagtaaaagatgctgtctttagtatcaatgcgagtaaggcgcctggtcctgacggttttacagcgggtttctaccattcttattggcatattatttcaactgatgttggaagagagatccggcttttcttcacttccaagaatttccctcgcagaatgaatgaaacacacatccgtcttatccctaaggatttgggacctcgtaaagttgcagattatcgaccaattgccctgtgtaacatcttctataagattgttgctaaaatcatgacgaagaggatgcaacttatcctcccaaagctcatctctgagaatcagtccgcctttgtgcccggtcgggtaatatcagataacgtccttattactcatgaagttcttcattttctccgcacctcatctgcaaaaaaacattgttcaatggcggttaaaaccgacatgagtaaggcgtatgatcgagttgaatgggacttcctcaaaaaagtccttcaaagatttggtttccatagtatatggatagattgggtgcttgagtgtgttacctctgtttcctactcctttctcatcaatgggaccccccaaggcaaagttgttcctactcgggggttgagacaaggcgaccctttatccccctgccttttcattctctgtacggaggtattgtcaggtctttgtacgagagcgcagaggctgagacaactcccgggggtcagggtatccattaatggtccgcgggtaaaccacttactcttcgccgacgataccatgttcttctcaaagtctgacccagaaagctgcaacaaactctctgaaatcttgtcaagatatggtaaagcttcaggtcagagcatcaattttcacaaatcctctgtcaccttttcatcaaaaaccccacgatcagtaaaaggacaagtcaagagaattctgaaaattaggaaagaaggaggcactggaaaataccttggattaccagagcactttggtcgtcgtaagagagatatcttcggggctattattgataaaatcagacaaaaatctcacagttgggcatctagatttctctcgcaggccggaaaacaggttatgcttaaggctgttttggcgtcgatgcctctctactccatgtcttgcttcaaactaccctcagctctatgtagaaagatccaatccctgttaactcgattctggtgggatactaaaccggatgtacgaaagacatcttgggtcgcttggtcaaagctgacaaacccaaaaaacgctggagggttaggcttccgtgacatagaacgatgcaatgactccttgcttgcaaagttaggatggcggttgttgaattccccggaatctctattatcacgaatccttttgggcaagtattgccattcctcctcctttatggagtgcaaacttccttctcaaccctctcatggttggaggagcatcatagctggaagagaaatcctaaaagaaggtcttggttggttgattactaatggagagaaggttagcatttggaatgatccttggctatctatttccaaaccactagttcctattggtcctgctttgagggaacatcaagatctccgggtttcagctctaatcaatcaaaacacactccaatgggactggaacaaaatcgctgtcattctccctaactacgagaaccttattaaacaactcccggctccatctagtagaggtgttgataaacttgcttggcttccagtaaaatctggacaatatacctctcgctctggctatggcattgcatcagtagcctcaatccctataccacaaactcaattcaattggcaatcaaacctttggaagcttcaaaccttgccaaaaatcaaacaccttatgtggaaagcagcgatggaagctctcccggtgggaatccaattggtaagacgccatatatcaccttcagcggcttgtcatagatgtggtgcaccagaatcgaccactcatctgtttttccattgtgagtttgctgcccaagtctgggagttagctccccttcaagagactacagtcccacctggttcttctatgctagatgcactaagcctcctcaagaaagcaattattctaccccctacaggtgttactagtgcagcgttgtttccttggatctgcggcatatatggaaagctaggaaccagttaatctttcaagaatcccatttctctgcaatagagacagtgacaagagctattcttgatgctctggcctggcaatcagctcaacggtgtttaccaaagactagaaacgttgtacacccaatatctcaactcccggtccttagatccggatacttttgcttcgtggatgcggcctggatagcgcagtcgtcgctagcaggttcggggtgggtctttcaatcagcaacggcgttggagaaagaaaccgctacctactccgccggttgtcgtcggcttccttcagccctgtcagctgaagcttgggcaatcaaatcagcccttctacatgcgctacaactgggacgaactgatctaatggtgctctcagattccaaatcggtggttgatgccttgacttctaacatctcaattaatgagatctacggtttgttgatggagattcgagctcttcgagtcagcttccattccctctgttttaattttatttctcgttctgctaatgcaattgcggatgctaccgctaaactctctttctgtaatgttgatggccgtggaactttatcttccggttatgtacgtttggtttagttttaatgaaattgggttttgacaaaaaaaaaaaaagaatagtgacactatatttggagtatcactattcaatactctaaatttgaagtttcatctttttatttgcatttaagtccctaaaattcaatgtttcataaataatcgtacaaattactatgtttatcatttgagaatattacgtaattagacactttttggaaacttaatgccgattaaggcactttaaaaagattgggcacttttctaagccaaattgtccaatttgcccttctaactataacttcctctcgtgataatattttttgacttatatctctcattcttctctctcttctctttcttttttctcactttatcgaaaaataaacaaaatcaagcagaacaaaaaaacaacttttctcattattttgctatttctttatcttctcatcacaagtcaattcaccaattcgttctcctattttgatcttctcgaattcctatggtttcattggaatctgagattcagtttcggctaattgaatgtactcgcttcattagtcaagttttggcactggtggagtacaaaaacggcaggtgtgtaaatgacgaaagcgagtacatttaacgacagaagaaacagccagtgattcgcgacaggagatttgggtctagatctaaaagtcattactttattcgatgtctcttcttagttgtttctccaacggatttgttatggtttcttgcgacggttgtcttttatatggtgatgaagtgtctgttggttggtggaggcgatcgagttgttggtggcgactgagagagcgttatgacttattcatcatcttgttctatatatgtataacttatgtgttggtataaacaaccatatggattgcacatcttggacacacatcaatggacaatgttgcatttgtttaccattaatgtgtcatcgctggatatggatccattatataattatgataatgtccatactctatacacaagtgaatattggtcaaagaaaaatggacggtgtatttctgttgagattgagttcttgattaaatatgtaagataaaatgcttcaatgagaacatgaataagaagaagaagctcaagcaaaagaagaatatgcatgggagaagatgaaataataagtgattgggctaattgttttgttaggcctaaatgagtaagtgtgttatgttagttaaagtttagcttagtgaagagttgttagagttgttgttgtgtaggagttgttggtaaaccttgcttgtaagcttgggtataccttagagactagagtaatgatgtcttaaagtaaggtctaggtctaagtagaagcataatgcaagtgtgtacttagtagaagtaaactagtatgaatatgtgtgtgtatgtcttataataagaatctatctttgaatccaatacaaaaatgttgacaactaatgttttcacttttctctctcttactaatcgttttatgtcttcgtgtcaaaacaagaaactaaccaaagactgagagaatgagagtgaaggttctttttgtgcttgagttaaaatgagtgagtgaaacaaagcattaaagagaactaagagatgtaagagaagtgaacctctaaaagttaaatagaggaagaacccaaaagttcaacaaattttttatcaacgattattgttcatgtataaatttgtgcattgatataaaacaaactgtgagttactaggtgaccatttggacttgattgtttggacactcgtcagtgaacaattatatctttaaaaagaatatctaaatgatttagaatgactaaatgttctttaagaatcagatggatgaaactttgtggacaacaatcgtaccaaaagcaccacatatagcttttccaattcttaacatgtaagaccaaaagattcacaactctcatcataacaatctgcacaatccacgatgcgtcatccataatgtgccatccatataaacattccattatcgtcatccacattgttagaactaagatacaaacattccataaacaagcaaaatctaaaatctaaaaagccaacaatcatatgatcagtttaacgtcatcaaattcaagagagtggccaagtgctatgcaatgataagagtatccatatacatgtgaacaaattgtcaaaacaaattggtgattgcagctaatgtaaaaagtcatatggatatagaggtgtggataggtgtgtgatctaaacacatcatttctagatccggaagatgtatctgttgggaaacgatagctccaataaaaccaaatatcacatcttccctagcatttttgagatagaaagagattaacacaaagttattgttagccaaagtttttgaagaccaactacgtatctataggctggaaatagagcaaaaattaaacaaggaattcaaggtgttcccagagaagggtattagaattttaactggaaaactagatgcattttaacaaatcaaatttcaatgtcaattcacaacattcatatcactggatcctaacttgggattgagtcaactacttaatttaaaattcttcaagtaatttgtcaaatcgatcctaacttgggattgaatcctatcttactatttatcaatttaacattcaatcttaagaaacagataaagccaagtaaaaatccaatacgagagaggataaaatttggttaaagatgctcttacctctcccaaacaatgattcagtttttcttcttccccaattcaaacatccttagtgatctgagttgagaccaatattttctgtcttaatcttcggcgaattggatttctaatgttaataatccttcgataagaaacgatggtggtggccataagttttccagcgaatggagaaaaatatacaaaagtaaaaaaaaaaaaaaaaaattagggtaaacatagattttgattgtgaatttaggataacctcataattttcatgattttgtaaaaattatagagaacgacaatgattttgaaagagagattgaaaatgatgaaaaacaaaagaatatggaagagagagatgataaaagggggatagtttcttacccacacgatctcatcaaaaataagtttaataattattgtgtcatcattacttcaggggtaaattagtccaatttctcctcaaaaagatggcaaagtgcctaatccctgaaaagtgcctcaaaaggaataaaattctttaaaagtgtctaaacgtgtcacattcccttatcattttagtcctttaatttttatatattcaaaatatttcaacactttgactcgtaatctacagattaaaaataaagagacttatctatctcttcgtaatgcattgattgatcacatatgagagcattacgaaaataattttattgagtaatttgtaatttataagttaatttatgtatttttaatttttatttatatgtattttatttataaatgtattgttttgttaattaagattatgtgtaatattttaatgtatgttttagtgttattattaaagttatatagttttaaaataattatgaacaatataaagactataatgcaaaacacatattttagaaacttcatatttaaagtatactcttggagaagaaactactcatactttatatttgaagtttacatactctatatataaaatatcttttggatatgctctaaattatattggattatcttttagagaacctaaaactttatatttgagggatagagtatctcttggagatgctcgtggtagttcaatattgtaccttaactgtaacgtaaatgttgttatctttacttagacgtctttgatatgtaaaaattctatctctgtatcctgtttgtactggcctctccaaggttcaccattattggatgatgcactgggttgatatatataacataactttttggcaaaaaaaagaaacaagaaaaaaaaaacagtctctttggcgatagcgatttggtcggagatttctccgattacattgattgggactttagtgaatcttcacagaagcaacttcacggagaacggcgagaagaatgtggaattgagagcgtcgttagaggatcgagaagcgtcggccgtttcactggagagatctagtgttgttcgttgatgaaggggttctaatttcgatacctaacggaattgatcattgataaggtctcattccggtggcaatcgtcgtcgccggaaacaatgtgcacagatacgaccttgaggttagtttattcctttaaaatctaatcacaacaaaatatatcatttgtattcatgggattatgttcattgtaatggatttgaggatttggtagataaaagtagtaaaaattgtggattgaagaattttcttgtgagagatggttgatgtaagggaaggatcatattctggaacatttgttagctttggttacttctcaccattgtgatgaaatttgctatatccaggggatgattcaagtgagagaaagataaagtttttttgccttcagtctgattctgcattgaatacttccagtgggctgcaggttagtgcttagtgttcttttgatatccttgcattgtcattccgttgatggctattctattgcctccaatgtatactcattccacttattggctccaatgtatactcattccacttattgcctccaatgtatactcactccacttattggctatgggctgcaggttggtgcttagtgttctgttgatactcattccacatattaccactctctaattttgtgacgtcaggataatacttaaaaacgttgtagcaaagcgggagatggcgaagaagagagagagtcccaagctcatcaaaatcaaagacgccattaaactcatcaaccaacaagtcagtctcattggtatcgtccttgaacaaagagaaccaaaacaatgtcgcaacaatggtacttatccaaaaaaaaccaaaatttgagttaaatacatagaattttgcttgaatctgaatcttagttggtttgttttgtgaaagccctaacatttgacccaacaaaatctgaaagttggatttttttcttagattggatttgtacgctacggataattgatgatacgtatccaagtcctggacttactgttaatgtatttagtaagactcttgaacaacttcctcaaatcaagaaccacgacgacatgattctgtttactcgcattaaggtacaaagacctcttcattttccttctgtgttttgtgcaggaggttataaagtttggatttttattgtgtagatgcaaacttttgatagtggagaaagagtaaatgctgcttgtagtagatgggtttcttcctttgccttgttcgaaggtgtggattttgtttgttaccaatgtagtaccaattttcatgaagaagaagcattatacaagagtgccatggatgatttacgcaaagtttttgcgggttgtagccaagttattaaaggtaacactgtgagcttcttttgctttcaactatgcatatagtataatggctttggatagcttggaacgattctcataagctttcatttactgttttggtacttagctatgcagagtatatcttacagaacaaaaccttgctccgaagttttttccttcttgagagagatcaagataggaaaacgctttgatttggtgtgcagggtaatatgctctatactctctattaactgtgagaaagctttttaactcttcattcctctataccacttcattgttacttcaaatctttttttggctccttttatgttttgttgactgatcctaccttgtttcctgctgtttcttgtgatggagattctccatgccgatgaagatactagcgctgtttttgtttgggacgggactgatgcacccccagcatctattctggctaagtgagtattaactgcgaaggaaaaaagttttaaatcctcacattatctgttttgagtcattcatttaggcttgactctacgctttccatatcctacgcttactcttcttctatttggtgtacaatgtttggctatcgacaggagaagtgaagaagacaaggcatttagcagtctctctgttcatactttactgtcaagagatgtactgctcagctttccaaccgttggaacgatcttgagagttcatctaagcagtcatctattttatcgggttaaacctggtgattgggtgaaactttaccatttactctgtgaagttgatagaggatcttgggtaatcaaagttaccagctctacaaaggttcatcatctcgctcaagatgatcgtttagttgaaaagatcatgaggtttgtacttcttgatatttctttcagtaactacttccgacctttttgcataccatgagaatctcttaccattttgttttataatctaatgtgccaaaaactaggatatatgataagagactatcatcaaagttgggacacatttcattctggtgttttccgtcacctcctggattaacaggttgcaatacttctcttttacttaatgagcaggatctaatctcaacgaatgtttttctctgtgtcaatctttagacagacttccttaacattcttggtgtcttgcagagacagatgacaattgtgccccatttgttacactgatggacatcataacattccccaaggtaccattcatgaatctatttgctgtattccctgaaaagattaagaatacttttatgtgatcgcctacgttgttattacaggttacatgcaagtacagatgtattgttcgggttgtagctgcatatccttggcaagtagaggatttctgttcagatgagaatcgccgtcaccaccaagttttgttgacactggaggattcaacagcgactttagaggctttcttatgcaataaagacgcagtaaatacaccatttggtctatttgcatctaaactgtcaacaaagatcgtctctgatagcctaatctagattttattggcaggagtacttttggggtttagggtttcaggacacagagacgctgaggaagaagcggaattggttgctcggtatacgggaaagctcgaactttgtggctccaagaaatccaccatggatcgagtgctgcatcctctcctactatactaacaaagctgacccgtggaatactagattatacagaatctttggtactagactacttcattaagtatttgtaagtgttaaaagaggattaaatagtttagtattaggctcatgttaagaatgttggatttggcttacttaagtatggtagttgtgttgttttagttcatgaagaccttgtaaccaaaagaacatcttcatgatattaaccaaatccaaagactgaacacaaaaatatcttcctctagacctaaagagttaatagaagcagcaggcaatatacacattttcattgtggaacaactctaccttgttcaaagttttaaaatggtttcgacctgtggaatgtttcactaacagtccttcataaaactccacaatcttcgctgatacaacaactctcccatgaatcaactcggatctgataagcaaaaagtattggtactatcaaatgtttgaactccaattttggttccacataacttaaaaaccattaatacgaaagagtctcacattgagtttaagacataatcagaagaaacaataaacaaccacacaagtctttcttgtccctaactgagaaaaaagagagccaatcgtagctgatgattagctgaggccatcttagtatcttctgggtgccctgccgccgaaagcagcgattggtgccatagcttgttgtggctcgactgcagagatgccggatgtgtcagacattcctagagaagcaagcatctcaagagtctctttgtcgaccttgatctcatcagtcttgatagcagactcatcgggaacaaagtccatacggcgttcacgctcttcttcttgaagcttgagtgagattccacggactggtcccttctggatacgtttcatcaagtgggtggagaatccagcaatcttgttgcggagtctctttgatgggatgatggcaacctcttcaaggatcttcttgttagtgtgaaagtcaagagtcatgcgagagtagtacttctcaatgacttgacgtgaagatttcttcaccgtcttggttctaacacgccccatctttcagtgacttacctgatgagaggagaaattccatgtcttattaaggattcaaaatcaagaaacaaccaagtatagatgatttatgtcttaaacttcaacattcaggttgaacactaaacaaacacaggaaccacatgtaaatgcaatgtcaaatattgtcaagagaattgaaaatgagtcaagtaatatacatcaacataacgctcaacttgaaagaggtctagtgttcttatcaaacaatataagccaaattttatacatacatttatattcagcctaaaagaatatcaactcacgacacacttttgctgaatgaaacacaaaataagagaaattcagaaaacaacagaacctcttcacacgttggtataatatacaatgcctaatattaagaccaaaaactcaactgcattagaatcttaattaatcagatacaaaagctacattatcaattttgacacatgaacatcaaaatcaagcaacctataacaattcacacagatacaacaagaatagcaaactatcaagtcaaaagtcatgtaaacgtgttcactattatccactagtcttctcaaattgatttcatcttagttagtagatgaaacccaaattcaacattacagtaatcaacacaaacaagtgagagtgggcaatataaatctaatgttgtcaaacccattactcaaaatctacagacctaaagaacttacaatcgaaatctaatgttgtctgagatcagatttatgaatactcaccggagacagagatggagacggagacggagacggagacgaagagaggcagagagcgatttcgatttggagatgcgagagaggcggagagaagtagagaaaatagggttggtgaaacattaaccttatatagggcttctaatactcggtttaggttaacccgatcggactctgataaccgaactgacccgaaccgaataccgatagcccaaattaatttttccgaacggtttacttctctgctacttcaattcgcaatgattcggttcttccggtttgctttactcgggtttaaccggaaatccaggcctatatgatttttagggtatatggttcaatttttgattatttgttttcgatttattttattaaatgataaataaataaatatgttttaagaaagtttaaggtatagggtttaattttgaaacttaatgttttactattttatcaatgaacaaaataaaatgcaaaagagttattaaaaacttaatcatatttgattaatctgattacatataattaataaatgaatgtcaaaacgtttgagcataattaacaaaacgtttgcttaatttaattaatatataggaacaaaataaaagttattttctgtagttgtactcatgtattcaatactaggatatgatccacggtatactgctggataatttttttttttaatgttgatgttttgtgttttgacaatatagtttatgttcagtatggttattgtatttttttcctactgctcaattatatattcggttgtgtgtataattaaagaacacgtatttaaggtaacgataacattggttattctacggatttatggaattaggcgatataatatgtatatttctgtaagcatatgattttgaatggttgttgatgtttttttttcttatataaaaactatatcttctgtggtgggtataagtatgtgacactttattttcataatgatatttagatttagtacttgtatttattttatttatgcaatgcaatgtggatatctcaagaatgtatattaatttggacagcaggtaattaaaataacaattatgaaattctaatgatgtatcataaaattgaaattgaaattagtaaatgtgtttgtcacaaatttctaaaaacaatatatgtttgtaacattaataattttgttagaaacttggtaattaacaaagcccattacatttacctcttttgtttaaagcatactgttattgaagcccaaatctaaaaccgaagcccacttaattttttccagcccaaacactattaacagtttttactgttaccaacgttgagaaaaaaaacaaatttggattcagtttttttttttttgtcaatcacattccgattcaatctgaacccagcttcttcacaacaccatatcactgatcgattgacaattatttgcgatcagggttttgattcagtttttgtccacttctcaatagatgatgctataaattgatgaaagattagaacatcatatatttattgttttaattctgttatttagcaatgacatataaagagagaaaatattttatgaaattaaagccattaaaaacattatcgagacatatccgaaggaagtagtattgaatcaagtatctagaactaaacattctagagtaaacaaaatttctgaagagagtagtcactgaatcaagtatctaatttacttcttgtatagtacattaataagtgtatcttgttctttgctaaaggaactcacttacatttccaacagtataaatagtataggcaaaacatccagttatatatgttaaaacaaggaaaccaaacccaacaagtttataatctgaaacatccacacaagcgtaatgagtcgatggtataatagagacatcaattgtttgcaaagccagaggtcgaaacgtataacctgggcatataagggcatacaaaacaatttcaaattgtcatttatcacaggaaagcctgagattcagagctaaagagaaggggaaaaaaaaaaaaaaaccacctaataaaagagagatgacaagcacacaacatgagacattcctcaaaaaaagttatgatcccacaatagtctatactccacatcatgtcctgtatttaacaatcacaaaacctcaaactaatctagaacttgaattctcaattgcaactaggcctgggcaaaatacccgaacctgaagaatcaaaccaaacccgacccaaaaaatccgattcgaatccgaacccaaaattttaaaatacccgaatggatcctaaacttcaaaacccaaaaaccagatccgaacctgaacccgatcaagtacccgaacatatccaaaatatatatataacaaataatttatcaataataatcatatctacaagtctacaacaacttaaatgcctaaaatatttggattttaagttattttgtatatttttaggtattttacctacttttagataaattcggatagaaaataatcaagtttttataaatttttgaatagtttcaagtaattttaacctattttgatataaaagttttgagttttggatactcctgataaacccgaatccgaacccaaaaaacccgatccgaacccgaagtcttaaaatacccgaacgggtcttagatttctaaatccgaaaaacccgacccgaatatctgaacgcccaaacctaattgcaactttcacatattttagaaactaaagcagatatcatagccattgtcatcacattgcctcaacaaatttgttttgccaaattttggatagtaactcaaagattatcgcactcaagagtttaagaaaacttccccaaagtgatcttccttacaaacacataatcacgatacaaatagatctaaccatcaagcagaagaccaaaaacaacagaatcaacaagcaaaccaagaccatgaaagtataaattgattaaactcagagaaacaattaaccaaaagaaactcatgttaagaatgttggatgtggcttacttaagtatggtagttgtgttgtttagttcatgaagaccttgtaaccaaaagaacaacttcatgatattaaccaaatccaaagactgaacacaaaaatatcttcctctagaccttggactaaagagttagtagaagcagcaggtaatatacacattttcattgtggaacaactataccttgttcaaagttttaaaatggtttcgacccgtggaatgtttcactaacttgaaaattcaattactaaataaaagggaaaaaaccaaaaaaaaacctcaactaaattttatttggacgtttaagacccaattgttttttgttggaaggtaaatacacgaagtaataaaaccgtgcaatttaatacacaaacaattaattattgctattttaatactcacgatctcataacaaaaataaaattccaaatttacccttaccatctcaattaactattatttttttaataatataattttaattttataattttgaataaaaattaattttattaacattttagttaatggtttcactaacttgtaaattcaattactaaataaaaggcagcaagaaatggaaagataattgctacatttataactctacttgtaaaaattctgtcatcactaaggtcaacaaagaaacgaatacataatcgaaaaagaaaaagaaaagaagaaacagagtaaacaaaagtcaaactatgctttgcttactcgttgaacatttgcctaatacaacagcttcactgaaccaaacagtatggtttttgcgtgttaatagtccttcataaaactccacaatcttcgctgatacaacaactcttacacttggtctcaatctgaaaagtgaaaccatctttctcttacagggtcactgaaatcaattggttcctgctccgatgtgaagcagctcctcggggattgcagctggatctaagtcccaacagttttcgggaaagccgctggttgcatctttaagaaaccaagacggcacttgatgtgaaaaccgcaacatttcacaccttggtatccacttcttactgtcctcccttgtgctcctgtgatacacggttttgtagccctctaatttaacaagaggggtaacgcacacaccatactgttcagtatactcatcaagaatctcgaccatttcatattggtgcctcacttcgtccggtgttgatccgtcccagttcagtgaccagttcttgtagacggcccaaatctccccagctgtggggaagattcgaacacaaccacctctccctgtcttcttgccttttaaaagatgcgaaaagatgttaacatggtctactatgtcagagtttcgtatcctgaaatgtccacacgactttgtaaacccatattgtacccatttcattgacccaaactcgatgtcggttttagagcttaagtaggcaatgtcaatcttaaagggttgaactgagagtacttccctcaccacacaatataggcgtggcataccatcatcttcatcataaattgcccatatttgccttggctcaaaggattcctccgatctgtttttatcaaagtcatggaaatcagagtctggaactgttattggcccgttagttttgcgccctgtaacatctcccaacttacaggagagaacagttttttcatcaaggggtgttgcatcctctgcagccgctgctgcctctaaagccaatctcatcatctccaatctttgcttgatatctgttctggccttttgaattaagggcttccgtgtatccaatactgatgcagcagaccaacgtctagttgaactttggatatgaagtttgtaatcctgatccattttggcatctgtattcgctgtctttgatactgaaacagatctcagagggttctcaacaaatccattagcagcagcttccataaaaactttgcttttcttcccaggtctgccgaccttatttgcactcgcgtgagcagacatgctgatctgattaggatatatcagaccacctggtgtgcttttcttcgagcatgtcccattagaaccatctttgactttatttattcccccgctgactactgagttgctgtgcttataaggatacccattagacactgaggacacacgcttcaaatccagattccctggggaggttgttgttccagagtacgagctccattcatatgaaccattcgtactataatcatatccatgtccttgcccaggatagtggcctaagaaatacgtggaattggtgggcatgcgtgacatagcatcataaccatgtgcaccatagccattactcggaggcgcatgagatggaggcgcatgagagggaggcgcatgggatggaggcgtgtaatgaaatggtgcactaacaggagctggaccagtttctacagcaataaatgctccacgacagttcttacatgaaagcctcttattcacatacttcctcagatactcatactgaactttgcaagaggtgcatacagtccagaaagtatcaagcctttctgaagatggtggaaaccgatcaaatactgcagtccccgtcccagtcccagtcccaggcatgtactctgtgctatgcttctgaacctcagtggagtcaatatgcttctttcttttgtaataaaaagtgcttttattaaactcattagacaagaaactccaagcttcagatatgagatgaaatgcaccatcagctccaatgcatttgttcttatcaggatgaagcaatacagccatcttcttatactgtttcttcacttctcttttccccgcagacggtttcagtccaagtaccgcgtaataatcaatctgaccaccgcttcgagtctgagaagctaaataaacttcaaacgtcgcaaccatctgagataaaccttccaaatcaggaaacaaagacttcgctttcaacgcataactcctagcgcttgtgaaatctttctccgcaaatctcctctcagcgatctgtttcactctgagagcttcctctctgtaagcttccatgtagaaagaaaccaacacaatatatgacagctctacaaaaggaaactaacaccgttcccgcaagcattccatattcaagcaccaaaagatcatcattatctgcaaacaaacattcacaagaacaacattaattctttttgagtcactacaaatgcaaaccaatacctaaccaaccacacatactcaaacaaacccatacttactaacttacaacaaccatcctaagattcgagatctagaatctccaagttcagatttttttttgacaaaatcgctaactttatatcacaaagacatagagaattatacaaaactagatttagatagtcaaaaagtagcttaattttatctccattttgaacaaatttcaccaaaaagtcagattcaagctatcaacttcataagacaaaacccaactcaaaaggattaaactttaaatcccaactcaaagtttactaatttcttcaataaacaacaatgacaaaaaccaaaaacctaaaatttcaataaatgaaataaactgagaatcgaagttagcgatcttactgataaattggggaaaattacaaacacagcttcaaaaatagatctctgaaacttcttcttcctccagagattgagtagatcaaatcggaagtaaacaaaaagcacgaatctttaggcaaagatttggaatcaagaacacagctttaataactacagtaactttagggttttagggtttcagtgaattcaggtaatcggcgattcaggcatcgagaatgaatcgccggaaaacaccgtcgagaatttcggggaaaaaaaaaatggaagctaaaataaaaatttgtttttttttttgttaagtaaaataattttggagtgaaagtaaacggtgctaatttgttaatagtggttatctcgactctgatatatgccataataattttattatataaagtatggttttaaaaattactaactcataagattatgtcatgtgtcaagtctatcgatcggatgttgacacatataaaaaaataattaacttttttctttttaaagaaatagaaatactaaaaaagaaatcaattaaattttttcttcttaaagaaatagaaaactaaaaaataaatcattattaacatatactaattcatatatttatatatatgtaaaatatattacattttatttttcttaaccaaaaggaaaattaaccaaaaatatttatatatgttattggtcaaaattttaatatgtatggtattaacaaattttttattattattaattatgttttgttaattgttaataatttttaatattaactaagatatagatttgatctcatatatatattattttgacatgaaatcattatcaagtaagatgaagtgtgtagaattaaaatcgagttttttatgaaatagatagttaaattgtattacaaaattgaatatgtaagataaaaatttattcttttcttctaaatactaaattataatataaaaaaagtgtgtaggttactatttagacttcaaatatcatcaataagattgaatgggtataataaaataaaatgcataagactactattttactattcaaaattatatatcaagaacaatgtatagattattattttattattcaaaatttaaatattatagataaaaaattacagttacattttacacccgcctatttaggcgggctttatctagtatcataataataatttgttaatagtgtaatatatgaatatgggttaaaataatagtttcataaagttatagaaaaattcaactttaataattgttaacaaaataataatatttgtaaacaccatccagttaacctatgaggttatgactcatgaagattcatttaagaattttcacacttattaaaaaaattattaatatttgtttttttctattttctaataattatacatttctcattttgttcacagttctaaataattataaactgatactttttttatgtcactatcgtgtgattggatgttggaaagtatgtaacaattgcatagttgggttttttgccaatgtaaatgtaagttgttagggatctagtggcacgctttgtggctgtgcctattccaaaactaactgctagtccaaacatcttactttgggaacgcagttaagatgtctttttaaacctcatttcttcttctccaaaatttaagaacagatcagaaaaaaatgtctcgagtagaaagaattgtatagtattgttttgtttagccgaaagtgttttcgcttgtctttactctttgtacatatttcttggatcaaaattttttaaccctacactctttaccataatattcataataatttcagttctctagatttttggccagtcaaattagcatttcgaactataatctattacttatgacgtgaatgcaatggtcgagacactagaaagacccgatatcaacctaaaacatcgataatgaaacacaatagtttcaaacttttgagaaacataaatccatgaagtaaatcaaaggttgctagagtagtcgttaaacttgcttctataacattgatttcattgctcatgtcagtgtctttcatatctggaaacagagaaacaatttgtttactctcacttgatttgaatgcaatggtcgaaacaccataaacaccataaacacaatagttttaaatttttgaaaaacataagtccatggactaaatcaaaagttgttagagtagtcgttaaacttgcttctataacattttatttcattatgccataaacatcaaaccatttacacctaacatctctcatataattttaataagaaaatgtcataaaaatatataatttacttctttttgactaaaaaaactttaactattccattagataaaataaatttccaattttatgttgattaagtcattttattttccttttaaagcaataataacgagttaaaattattgactaacaacggagataaaatagtaagttcaatataaaattgaaaatttttttatctaataaaatagtttgaaagctttttcgttaaataagtttggaattgtttttaaaattctttattttttctttttttgaacaaaattcttttctttttcaaaacaacccaaacacagcataaaatgctacgcgcttgccgacaaaaaaaagcaaagaaacgcttttacgaaacatgtcaagtctaattagtctaataattgtatgttgttctttgctaaaggaactcacttacatttccaacagtataaatagtataggcaaaacatccagttatatatgttaaaacaaggaaaccaaacccaacaagtttataatctgaaacatccacaagcgtaatgagtctatggtataatagagacatcaattgtttgcgaagccagaggtcgaaacgtataacctgggcatataagggcatacaaaacaatttcaaattgccatttatcacaggaaagcctgagattcagagctaaagagaaggggaaaaaaaaaaaaaaaacacctaataaaagagagatgacaagcacacaacatgagacattcctcaaaaaaagttatgatcccacaatagtctatactccacatcatgtcctgtatttaacaatcacaaaacctcaaactaatctagaacttgaattctcaattgcaactaggcctgggcaaaatacccgaacctgaaaaatcaaaccaaacccgacccaaaaaatccgattcgaatccgaacccgaaattttaaaatacccgaatggatcttaaacttcaaaacccgaaaacccgatccgtacctgaaccccatcaagtacccgaatatatccgaaatatatatatatatatatatatatatatatacaaataatttatcaataataatcatatatacaacaacttaaatgcctaaaatatttggattttaagttattttgtatatttttaggtattttacctacttttagataaattcagatagaaaataatcaagtttttttataaatttttgtgtagtttcaagtaattttaacatattttgatataaaagttttgagttttggatactgcggataaacccgaatccgaacccgaagtcttaaaatacccaaacggatcttagatttctaaatccgaaatacccaaatccaaaatacccgacccaaacccgacctgaatatccgaacgcccagacctaattgcaactttcacatattttagaaactaaagcagacatcatagccattgtcatcacattgcctcaacaaatttcttttgccaaattttggatagtaactcggaatcattgactactagtattagacccgtacggagaaaaataactttaaagacgaagatgtaagagattaaacatgaactattaacacaaagtcactacctagagccatatacaaatggatcatcttcaaattcttttgttgttgtcagtttatctttcagtatgtcgtctttgttatgaagccatctccatggaaactccatatacttgatagcatcgtcttttcagtgacatttagtgcttaaacgtttgaataacgtttttgaattatttgtctcccttttgtcgtaattgttgtagcccgtagtcacctaccttcaaaagagaaacatgtatagacggataatagagatggattaaagaaatgagagatagtatacaaaagtcagctatattttttaaatccttacacaaatattgaatgcaaaacagtgtaatgcaaaatcataatcaagtaatttgttacaaaacattatagtagaaaaaaaagtttgcacttgagtaacccgattttaaagatacataagtcacgtacttcgtaagtaatttgtaaactactcacattataaacatttatctttcagttagtgaatccaagaagactgaatcataaccaaactgttacaatccgataacttaaagatcgattcaacacaactcgattcaatcacaacacaactcgatcaagcttcaattcgcggaacacttaatagatcgatcaagaacataatcaaacaaagaacgaaacgaacacacgattgtttacccagttcagatcaccggtgtgatgatcctacgtctggggctggattcaatccagcaatccactatgaatcaatatttactcaagctcaaaacccagagctcaagatcgtgttacaaaggagaagaattgagataagaattttctgttacaacgaacaaaggaagaagaagactatttataacagagtccaagtcaaaccctctaataccaagagagtctcttcaatcttctactgaactcaaaccgatttctcctttctccttcaaccaataccaaaccggcattgaaccgtgatccaacaactaactgattaaaccaagtcgacatcaggctaaaccagaagtttgaatcacacctttacaattctccatcttgatacaaatcttcttcaacacagtagactgccatgcttggacttaacctccagcaatgcaagcttaagagcttacttccattcgatcagcttcagagtatctaaagctgaatcaaaacttttcacgggaatgtacttggtcaacatatcagcaggattaatagaagtgtgaatcttcacaacttcaatgtttccttcttcaataatctcactcagaaatgacctcttgcgtgccatgtgtttggttcgctcatggaacacactattcctcgataaacagatcgctgactgagaatcactccagacctgtgctttatcctgctgaaaaccgagatcttcaagcaaccctttaacccatatagcttcttttactgcttcagtcaaagctataaactctgcttcagttgatgacaaagccactacggattgtagacaagacttccaactgattgtattacctcctactgtgaaaacgtatccactagtagaccttttcctatccaagtctccaccatgatctgaatcacagtaaccaatgacactgagatctttccctttagtatacaccaaactcagatcctgtgatccttttatgtaccttagcagccacttgactgcttcccaatgaactgatcttggtttactcatgaaacgactaactagtcctattgcataggctaagtctggtctagtgctgatcatcgcgaacattacacttccaacagcacttgagtatggagttttaactgtatctatgcactctgaatcgtcctgcacagatgcaagtttaaaatgtgtaccaataggagttagagctgacttgcaattactcatattgaatctctttagcacctttttcaagtatcctgcttgagataaacacaaaactccattcactctatctcttgtgatttaaataccaagaatcttatttgcaggtcccatgtctttcatctcaaactcactactgagtctcttcttaaccttgttaacctctgacatattcttagctgcaatcaacatgtcatcaacgtataacagaagatagacaagttctccattgttcattgtcttcacatatacacactgatcatgatcacttctctgaaatttctcatctgtcataaacttgttaaaccttttgttccattgccttggcgcctgcttcaaaccgtacaaggacttcttgagaagaaaaactttgtcttcgtttccaactgacaccacaccctctggctgctccatatacaactcttcttccaattcaccatgtaagaaggctgttttaacatccatatgttcaagctctaagtcaagattaaccaccacaaacattaagcctctgatagacgtgtgtttaaccacaagggcaaatatttcctggtagtcaattccttttttctgtgagaatcctcttgcaacaagtcttgccttgtatctcttggattcaacacccggtataccaactttgattttgaataaccacctgcaactgataacctttctgtcctttggtctgtcaacaagttcccaagtaccattctttgttaaagaatccatttcttcaccgatagctccattccatagctcccagttttcatccttttgagcatcatgaagacattgtggttcttcttccacattcagtatctcatatgtcattaacgcaaatgcaaattgagaatagtctttcatcttaaccggagctacgatctgtcttcgagttctgtctcttgcaagttgataatttgtcaacccacttggttcaggtgactgagtaactgcagtttctgcaggttcttcagaatcttcttcagattcactttcacagacttctaccagctcagtaattactccaccttgcttagaactgactcgcttcttgaccaattctgaaataacatcagaatttgatgttgatgcttcagcgtcttctgctactgcatcattcacatctttgttcaggtctttgtagaccatatcttctcgaaatatcacatttctacttatcacgcattttctttcatcaagcagccatatcttgtaaccttttgtgccagcagggtaacctaagaacactcctttcaatgctcttggcttcagctttccttgatcatgatgaacatatgcgattgatccaaatctcttcaagtgtttgtatcccggctttctgtttagccatagttcttcaggaacattatgatcaatggctgaggcaggaaatctgttaatgatgtatgcagcagttgcagctgcttcagcctagaaactctcatccagacctgactcattcagtaaacatctcactttctccatgatcgtcctgttcattctctctgcaacaccattttgctgtggtgtgtacacacacgtcctatgtctttcaataccatgggtcttgcagtacctgtcaaacttagtattgcaaaattacaacccattatttgttctcaaacacttaacctttctatccacccgattctctacaagttctttccattcacaaaacttatcaaaagtttcatccttagtcctaaggaaatataaccatacttttctagtcttatcatctatgatagagagaaagtattgtttacctgataaggagggtgataaatttgatgatccccagaggtctgcatgaacatagctcagtgcttccacaacatcatgttttcccacattgaaactcagtctcttggacattcccattacacaatgttcgcagaaatccaaaatctttgatttctttaccgttcaatagacccttaccagcaagaactttcaggttatttaaactcatgtggtctaacctgctatgccacaatgctgttttactctgtgagtccacagctgcacaactttcagtcatcaccgtctcaccatcaagaatatacagaccgttgactaagcttccacacaaagcagtaacctgattcttaaagtatctcacttttcctgctccaccttcatgttgataccctaacttgtcaagtgttcctgtggagatgagattccttctcaggtttggcacatacttgacattgtttagaatctttatagatcctccatgtgtgttaactcttatggaaccttggccttgcgattcaactgagtgatcatctccgagtagtatggttgtagatccattttcctgaaaatcacagaaccagtctcttctataagtcatgtgtgaagtacaccccgagtccaaaacccatagatctttaaccatctgatcattcacacttagtgcttcagagaaaacaagtttctctatgatgacaccagcttcaccaggaccttctgtttccattttcttctttctagcaaaacagtctttcttaacatgaccttctttcttgcaaaaccagcaggttactcttgttttagagtttgacctgcttctacctctgccttgaccacccttctgattgttttgattgttctcattgtttctcactagtggtctacctctttcagtagtatacaagaccgttgaggagcttctttcaagatctagagattcatttagctctctctccaacgacttaacagaggagattacatcctgcagagacaaagctttgttcccatacttcagggtatgctttaactgagagtatcttgatgacaatccattcaagaacaatattgcacgaacttcttcacctaccacaatctcaagactgcttaactcggcaattatcttcaagaattcattcacattctcattaattgacattgtgtcattcatcttgaatgagtaaaacttaagctgcacatagattcgatttggtaacgatgtttccatatacagcttgttcaaggtttcccacatctctgcagcagacttgcagtgatcaattttcctcagaacaacatcaccaacgtgagcgataatcacattcattgcttgttctgatttctccatctttacaagattaggtacttccttagtctgtgatgactctgatccatcatcatcaccttcctcaaccttctttccttcacttttagttagcggaacaaatttcgtcaatgtgaaatcatcgatcactcctttaagcccagctaagccaagatgtgctttcatccttgtcttccatagcgagaagtctgagttctcgttaaagacttgaaacgaagcctttaaccctgaattcaagcttgcttcgttcgtcatcgccattaaagaaccttaggctctgataccaatctgttacaatccgatgactcaaagatcgattcaacacaactcgattcaatcacaacacaactcgatcaagcttcaattcgcggaacacttaatagatcgatcaagaacataatcaaataaagaacgaaacgaacacacgattgtttacctagttcagatcaccggtgtgatgatcctacgtctggggctggattcaatccagcaatccactatgaatcaatatttactcaagctcaaaacccagagctcaagatcgtgttacaaaggagaagaattgagataagaattttctgttacaacgaacaaaggaagaagaagactatttataacagagtccaagtcaaaccctctaataccaagagagtctcttcaatcttctgctgaactcaaaccgatttctcctttctccttaaaccaataccaaaccggcattgaaccgtgatccaacaactaactgattaaaccaagtcgacatcaggctaaaccagaagtttgaatcacacctttacacaaacaaaatcattgattaaaaaccagaaactaattggcatttaattaataccctaaattaacttttaagtttatatttgtgtaccttttcctcctcgagaataacttgcatgcaaggacttttatctttgggctaaagctcttattattccattttgttttgaagagttttgtagggaggtaggagtataatccagtagggcattggtatgttcaacttgaatcatgtaaaatcagagaaaaagtaatatgtgatcaatataaaatgaaattgaatacagagtagtcataaatctagatcagtgactttgctaaattcagtgaatacgataaacacggaaatgaaacgactaagagaagacaaactggcaatagagattagaaacaggaaaagagatgaatatgataaaacgatggaaattaaaagtgagaaaatagataagaggagttgattgttgggagttaaataagagatcaaacagtttcagatcgtgacatattttatattgaacgtggtttgtggtagtttgagcaaatttagggatgtaagatttttggagttttagaaatgcagttttttttctcttttttttttagcttttttctcttttcttttacgtaccactattttgttattaactatttttaattttttttttaaattaaaatataaaaacaaaatctatgtggcaggttttaattggccaagtgacttgtgatttataagataaaggataacagagattatcagccttaccaaaaaaaactcagagattatcaaagtcaaaaatttaagaaagtttccccaaagtgctcttccttacaaacacataatcacgatacaaatagatctaaccatcaagcagaagataaaaaacaaccgaatcaacaagcaaaccaagaccatgaaagtataaattgattaaactcagagaaacaattaaccaaaagaaactcatgttaagaatgttggatgtggcttacttaagtatggtagttgtgttgttttagttcatgaagaccttgtaaccaaaagaacatcttcatgatattaaccaaatccaaagactgaacacaaaaatatcttcctctagacctaaagagttaatagaagcagtaggcaatatacacattttcattgtggaacaactataccttgttcaaagttttaaaatggtttcactaacttgtaaattcaattactaaataaaaggcagcaagaaatggaaagataattgctacatttataactctacttgtaaaaattctgtcatcactaaggtcaacaaagaaacgaatacataatcgaaaaagaaaaagaaaagaagaaacagagtaaacaaaagtcaaactatgctttgcttactcgttgaacatttgcctaatacaacagcttcactgaaccaaacagtatggtttttgcgtgttaatagtccttcataaaactccacaatcttcgctgatacaacaactcttacacttggtctcaatctgaaaagtgaaaccatctttctcttacagggtcactgaaatcaattggttcctgctccgatgtgaagcagctcctcggggattgcagctggatctaagtcccaacagttttcgggaaagccgctggttgcatctttaagaaaccaagacggcacttgatgtgaaaaccgcaacatttcacaccttggtatccacttcttactgtcctcccttgtgctcctgtgatacacggttttgtagccctctaatttaacaagaggggtaacgcacacaccatactgttcagtatactcatcaagaatctcgaccatttcatattggtgcctcacttcgtccggtgttgatccgtcccagttcagtgaccagttcttgtagacggcccaaatctccccagctgtggggaagattcgaacacaaccacctctccctgtcttcttgccttttaaaagatgcgaaaagatgttaacatggtctactatgtcagagtttcgtatcctgaaatgtccacacgactttgtaaacccatattgtacccatttcattgacccaaactcgatgtcggttttagagcttaagtaggcaatgtcaatcttaaagggttgaactgagagtacttccctcaccacacaatataggcgtggcataccatcatcttcatcataaattgcccatatttgccttggctcaaaggattcctccgatctgtttttatcaaagtcatggaaatcagagtctggaactgttattggcccgttagttttgcgccctgtaacatctcccaacttacaggagagaacagttttttcatcaaggggtgttgcatcctctgcagccgctgctgcctctaaagccaatctcatcatctccaatctttgcttgatatctgttctggccttttgaattaagggcttccgtgtatccaatactgatgcagcagaccaacgtctagttgaactttggatatgaagtttgtaatcctgatccattttggcatctgtattcgctgtctttgatactgaaacagatctcagagggttctcaacaaatccattagcagcagcttccataaaaactttgcttttcttcccaggtctgccgaccttatttgcactcgcgtgagcagacatgctgatctgattaggatatatcagaccacctggtgtgcttttcttcgagcatgtcccattagaaccatctttgactttatttattcccccgctgactactgagttgctgtgcttataaggatacccattagacactgaggacacacgcttcaaatccagattccctggggaggttgttgttccagagtacgagctccattcatatgaaccattcgtactataatcatatccatgtccttgcccaggatagtggcctaagaaatacgtggaattggtgggcatgcgtgacatagcatcataaccatgtgcaccatagccattactcggaggcgcatgagatggaggcgcatgagagggaggcgcatgggatggaggcgtgtaatgaaatggtgcactaacaggagctggaccagtttctacagcaataaatgctccacgacagttcttacatgaaagcctcttattcacatacttcctcagatactcatactgaactttgcaagaggtgcatacagtccagaaagtatcaagcctttctgaagatggtggaaaccgatcaaatactgcagtccccgtcccagtcccagtcccaggcatgtactctgtgctatgcttctgaacctcagtggagtcaatatgcttctttcttttgtaataaaaagtgcttttattaaactcattagacaagaaactccaagcttcagatatgagatgaaatgcaccatcagctccaatgcatttgttcttatcaggatgaagcaatacagccatcttcttatactgtttcttcacttctcttttccccgcagacggtttcagtccaagtaccgcgtaataatcaatctgaccaccgcttcgagtctgagaagctaaataaacttcaaacgtcgcaaccatctgagataaaccttccaaatcaggaaacaaagacttcgctttcaacgcataactcctagcgcttgtgaaatctttctccgcaaatctcctctcagcgatctgtttcactctgagagcttcctctctgtaagcttccatgtagaaagaaaccaacacaatatatgacagctctacaaaaggaaactaacaccgttcccgcaagcattccatattcaagcaccaaaagatcatcattatctgcaaacaaacattcacaagaacaacattaattctttttgagtcactacaaatgcaaaccaatacctaaccaaccacacatactcaaacaaacccatacttactaacttacaacaaccatcctaagattcgagatctagaatctccaagttcagatttttttttgacaaaatcgctaactttatatcacaaagacatagagaattatacaaaactagatttagatagtcaaaaagtagcttaattttatctccattttgaacaaatttcaccaaaaagtcagattcaagctatcaacttcataagacaaaacccaactcaaaaggattaaactttaaatcccaactcaaagtttactaatttcttcaataaacaacaatgacaaaaaccaaaaacctaaaatttcaataaatgaaataaactgagaatcgaagttagcgatcttactgataaattggggaaaattacaaacacagcttcaaaaatagatctctgaaacttcttcttcctccagagattgagtagatcaaatcggaagtaaacaaaaagcacgaatctttaggcaaagatttggaatcaagaacacagctttaataactacagtaactttagggttttagggtttcagtgaattcaggtaatcggcgattcaggcatcgaaaatgaatcgccggaaaacaccgtcgagaatttcggggaaaaaaaaaatggaagataaaataaaaatttgtttttttttttgttaagtaaaataattttggagtgaaagtaaacggtgctaatttgttaatagtggctatctcgactctgatctatgctatcgtgcaccgtaatgaggagtgcgcatattttttttttaataaaacttttaaaattgttttaatgtgataatttataatttttaatatatgatgcaagttgcatttatcttttttttgtcatcttttgaaaattaaacttttgaaacaacctcaaccagttatttattttgaatgtggaattatcttaaatttcagtttaaagatatgaataataagactatgggttaaaaattaaaataatagtttcataaaggtatagaaaaattcaactttaataattgttaacaatataataatatttataaacagcatctagctaacctatgaaggtatgactcatgaagattcatttaagaattttcacacctattaattttttttattaatacttgttttttctattttctaataattgtacatttctcattttattcacagttccaaatagtttaaactgataactttattatgtcactaattggatgttggaaagtatgtaacaattgcatagatcgtaacaagtaatagttgggaacagatcagaaaaagatggctcgagtaaaattgtatagtatcgtttggtttagccaaaagtgttttcgcttgtcttaactctttaacgatcttgagatgagctttgtacatatttcttggattaaaattttatataccgacactcttcaccatatccttcctaataatttcagtgctttagattttttgctactcaaagtagcatttcgaactataatctattacttatgacgtgaatgcaatggtcgagacactagaaagaccggatatcaacctaaaacatccataatgaaacacaataattttgaaaaacattagtcaatgaagtaaatcaaaggttgctagagtagttgttaaacttgcttctataacattttatttcattgctcagatcacggtctttcatatctggaaacagagaaacaatgtgttttacaattcgcacttgatttgaatgcaatggtcgagacaccataaacaccataaacacaatagtttcaaaattttgaaaaacataagtccatagagtaaatcaaaagttgctagagtagtcgctaaacttgcttctataacatttatttcattatgcaagtacatcaaccatttacatttaacatctctctcatataattttaataagaaaatgtcataaaaatatatgtaatttacctattttgactaaaataactttaaccattccattagataaataaatctccaatttttatgttgattaagttattttactttcgtttttaatcaataataacgagttaaaattattgactaacaacggagataaatagtaagttcaatgtaaaattgaaaactttattcatctgataaaatagtttgaaagctttttcgttaaaaaagtttgagattatttttagaattctttattacatttatcttttttgaacaaaatctttttatttttccaaacaacccaaacaccacataaaaatgttaagcgcttgccgacaaaaaaaaaacaaagaaacgcttttacgaaacgtgtcaaatttaattagtctaaaacgccgtcgtttctgtataaccatccaacagatccttgtgcttctttttcattacaaggaagactttttcattacaaggaagatcgatcacggacaaaatttgcagagacattgtagacaaagatcattcatgtttcttcaactccggtcttaggtattaattctcttacaatatttctaccttttttactcaattccttccttcattctctaatctcgaattttccaatgcatttttctctgaatttgttcttcaatcgagtttagttagctagggtttttgcagcaatgtcttcgtgatacttcgatttcataaacaaataagatctctctataagtttttatttagatgatccaatacgttgacttttcttaaaattatctgctagatttcattgtttcaattcagattcgaaaattgaaagtttctgtgacattacagttagagaaaggagcttattgaagaatcaatggcctctgatagagaagagtttaacttgtgtggacctacacacctcacaactgttgattggtatgtttggattgttaactcaagatcaaacatgtagttagacttatgaaatggattcttgagatatgtctttgtgtttttttacaggggaaatgaagatcaccaacgttgtgtagcagcttgtttggtacaaggaatctatatagtagagcaagaccgtcagcttaaacgtgaaggcactgaagctcttgcatctccatggtgggaatcattcaactttaaattgatccgtcaccttaaagacgatgctgatttctccatctttggtggcatttttgaatacaaatcgttacagccagatgttgtggactctggagttccacggtatgttatagcctttagagggactttgactaaagcggattcgataacccgtgatatcgagttggatatccatattatacggaatgggcttcaccgaacgtcgcgttttgagatagcgatgcaagctgtgagaagtatggctgattctgtgggagcttcgagcttttggcttacggggcattctttaggtgcagcgatggcgcttcttgctggtaaaacaatggggaagagtggagtttatattaagtcattgttgtttaaccctccttatgtgtctcccccgattgagaggatagcaaacgaacgggttaggcacgggattagattcgcggggagtctaatcaccgcaggactcgctctctctagaactcttaaacaaacacagcagccgcaacaacagcaactgcaactacaaaacttgactgaagatccactagaggcattatcttcgtggctccctaacatacatgtaaatccaggggaccatctatgttcggagtatatcgggtttttcgagcaccggggaaatatggaacagattgggtatggagccggaattgtggagcggatggcgatgcagcattccttgggaggtttgttgatggatgcgatgggagtgagcaatgcagttgaagtagaagagccggttcatgtcatcccatctgctaatcttatagtaaacaaaaccatatccgaagattacaaggacgctcatgggatacaccaatggtggagagatgaccaagatttggtttcccacatttacatgtacaaatagctctcattcttttcctttttctcattactaagatttggtttgttcctacatttttttgtgatgaagacaatttagaaaatgattcttttaactatgtaatagtttgtttgtatgatgattgtattactaaatcttgtaccatttcgaccactcagccacttcatcctcgtctctcttctcctctgaggaagactttagaaaaactcgaaaatttgaagagagttaggttgaatcggcttagaacttcaagttacagcgctctgataccataatagaactagagagaatcgaagaaaccatcgaagaagaagaagtttctattattcatcttaagaagtttgttacagtgagactctctttaaatactagagagtttcggttcataccggtttacacttaaccgaaccatacaatttcatcaattatatccgaacaagagtctattaactcttcttggccattgtgaaaacatacattccgaacaaaagtctgtagctctctcaagtgtccggtctccttcatccttagatcttcccttgtagttgaacccgcttcttcaattataaatacagtacttctctgtttcggagagacttatgtgaaacccttatcggttggagaagcgagtggtccaagtcaagggcaagctgaagcttcttctcgttgtgtcatgaacatatagaattatagatgatcaaataagtcctcaacgttttctctatatttttagatattttgtcttttgtgctttagtttttggatacttttgtattatactatagagacatttggacaatgttttttttttcaaaggactttttatatatattacaaaactgaacagcaagttccaccactggagaaaccatggtgaaaaggcaaaaaccttatacaaacagcctttcttacgttaattgcaaaccaaacagaagttacaacacattcaactaccaaagccaaaagaaataaaatgataactttgaaacagtcttcataacgtcctcaataagagcatagttccaatcaagagaattggacatgatcttagagcatccaacttttgcatttgttgtgaacgacctgtatatatcatcatatcctcctttcgagaaatagtagcagcataaccccaaaaggtagtcacctgaagatcaccaagcttgtttatgccgatcttcctgttaacatcatcttgacaaaagtaactcaaaatgtgtccactaacttatctgaacagtggagatttattacctaaaaagaaaagactgaacctatccttgacacttctcagagaagaccagacctatctctagaaggaaaggattagattgaaggatttaaaagcaaactcttttcgtgttcaaaaaaacctgctaaccatctaggagcgtggcgagcaacataagaactcaacctgagatctaatgtcacactttttgcaataaaaaaagctccagtattgcattttgtgtaggctcaaacagaacaaaccaatcctgttttccactgcctaagacaaggagaggagcaatgtgacttaaaatcaatggccattcagtaggcttgtgaatagctttaatgatgttcatagtggatgcagcaaaagtcactttctccatatgtaaactattcatactttttaaagcccattcccagcaacatagagagaaccagagaataagatcttcaactatgaaaaaggacattgccataagagtcccttaccacccatgaagcaccagaaagagataactttttacaccaagaaaagccaatgttgcatttcaactcatttttccaaggtggctgccatattgattcgacaagggaagacgatttttcttgttttaagtccagtgaatgtgctaaataccaatccttagtatcatcccaagctttctggattaatagatgagaaggcaaatgaaatccattgaaaagcaatgaatttctgttcttccatatatgccataaggtccacggaaaagctgaattagattcaaaacaagtagcctcacaagatttcaaactgagaagataatgcaaattctgaaattctgagttaccataacccaaaattggagaagggatgttggataatgcccaaacttgtcttgcaaaaggacaaagaaagagaatgtgattgatggtttcaatctcttcatcacaaaacaaacaaccatccgtcactttgagtcctcttgatcgcaatctatcatgaaccgcaagagcacctttgagagctttccaaagaaaaactctaattttaggagcagtttctaccttccaacaaacatgaagaactggatttctagagggacatgattcttctattcgtaatctgtctttatggacaaatctaaacattaagtcataacccgacttagcagattagatgccatttctagtttccccccaacaaaaagaatctgaatatccaatcctgggttttattgctttgatgcgatttatttcagaatggtgaaacaaggaccttagcaaagtatcatcccacacaccagattgttgattgaaaagatcagcaactttaagattaatatttgtaagggggtgataacttacgggtcttctagctttaccatcatacaactagttgtcgatccataacagagtatcttccccattaccaatgattcgtttaagacctttagtcaacaaaatctttccaaaccaagcgtaagaaggacgtgaacccattgaggctgacagaaatggtgaattgacaaagtagcggcttttaaaaaacctggaaaaaagacattatggatcatgatgcagtctccatgcttgctttgccaaaagagattgattgaaaatttccaagtctttgaaaccaaaacctccaagtgccttaggaagagtcaacttctcataactcagccaatgaatcttactctgatgttgagcattattccaccagaaatcaatttcttaatggtactcttaggaagcttaaaacatgacatagcgtatataggtaaagccatagcaacagattttaacaggatatctttgcctccttgagacaagacttttgcataccaacctgtcaactttgcttgtaatcgttccttaataaaacctaaaagaagttgcttggaaccactcaaacactctggaagacccaaatacttccctgtacctcctgccaattcaattcatgtgttcaactttatccattcccatacatccttatctgatttagagccaaaagtgatagcagatttctgtttattaatcatttgcccagacagactttcatattgatgtaaacacgtcatcatcgcagagcattggtctttagtagctttacaaatgaaaaggctatcatttgcaaataacaaatgattaatagcaggtcctgattgatgaaattgtattccagacactttaccgtccctttcagcttgcttgaagagatgaatcaaagcttcagtacataacacaaaaagaaaacgggaaagaggatccccttggcgtatgcctctcttaggtttaatcaaaccatagggttgtccattgacggctacaaagtagctgacagatgtaacacatcccattatccaagaaatccacaaatcctgaaaacctaaagcttgacgcatctcttttagaaacttccattctactctatcatatgctttagacatatcagttttaatcatcatggaagattgagagatctgtggatgagagtgaagactatgaaccacttcatgagcaatcaaaatattatcagaaatcagtctttctgagacaaaagcatcttgagtgggagaaattattgtaggtaagtgctttttcagtctgttaaccaagattttggagactattttataaatcaccgaacaaagacttattggcctaagatctgtgatttgctttgggtctttaacttttgggattaagcataagtgagtatgattccagtcttccggtaaacaaccagtatcaaaaaaccgaagaacctcagagataacttgatctttaaccaccttcccaataagttttaaagaaaaagccagtcaaaccatgtggaccaggtccactctaactactaatggaaaaggcagcttgccgaatctcagtaggggaaatcggtttagcgagatcttgattcatagtctctgttactctaggttggaagttatgaagaaaaacactaacctggtttgtgtggacagatttaaatagatcagagaaatattttacagcaatctctccttttttgcaatctgaaaactgatctataccattgtcatccaccagaaattgtagtgaatttttcactccatcagctttttaacagaggcttggaaattttttgtatttctgtcgccatcattaagccatttttcttgactcttttgtctccaaaaaacctcttcttctctaaatgcaattgctaactctcgctttatcacactaatcctttgaaaacaaggagtcaaagatgcatcctgagcagccagttcctttcgaagcctcttgattcgaatctctgaattagaccagattttattcttccaaactccgatggcttgtttacaatcagcagccctctctacaacagatttgaattttccctgccacgcatcttgtataacttgaaagaaagagggatcttcagcccatcttttatcaaaccaaaattgtttactaaataactccttgtcagtagtaaacttgcctaagactggcttatgatccgatccaattttctcaggaaaccattgatgagcactagaaaacaaatcaaaccaagcaggattaccaaaacaacgatcaagtttgcactgaatccattgcttgtttctcacacctccccaagtaaatccattaccagaacttgccatttaagtcacatcacaattctccaaaaaggactgaaaagggatgaaagaactaagctctctaactggacctccaagtttttcatcatttgacaatatcgcgtaaaagtctccaatcatgaaccaagcttcagatcttgacctcccaaaactatagattttgtcccacactaagggtcgaagactagtaacaagatccccatatacacaagagacaagccaactctttacaccatcacaaactttcatatctataatgtttttatccacaaaaagaaaatcaacgagaaggttatctttccaaaaaattgctaatccaccactagtaccaacatgttccactgttttaagatttttatatcctaaccaaccttgaatttttttaacaaaagcttcagaattttttgtttccatgaggaacaacatctcaaggaaatattccttgcgcagttccctaaaaaacgaattgtccaaggatttctcagtccttggcaattccagcttatgacgccttactgagactgcggtagttcactaggaactaccgtagttttgtctgttttagaggaagtagctataccttttcttttttctagagaatttctattcagatcagacttgttctctaaagattcagacataattttccgatttttgccttttctatctttagtattccttatccaagatctaggccttttacaagtactggtatcgttggtaaaactaattgaagaactggcctctaaactaccagagcagaaatcagatggtaaaccaacaaaagggttatctggaacaccatccatacataaggattctgagttttgaaccaaaggctgactaacaaaagctttcattgcatcagccataagtttaggtggaggacatactggtgtctgattcttttcaaccaacgggactgaattgttatccttgtctgaagcaaaaatcaactctgaaaaatgattctcgaccgaaattgaagctacagaaggaaggtaaggacatctaggtttctcatgggttaacctttggcattgaaaacatctttttctaatcctttcatagtcaatcccaatctttaccatagatccattcggtagttgaatctcttttgaattgcgcaaacccttcgaaacatcaaagagaatcctgatacgaacatagtctttactctgagcttcattctcatcaaagggaaattcgattacctgccccacacacttagcgatgctcttaatagtagcttgagtatagtgattaaccggaatattacgtaggcgaagccaaatcaaaaggaacataagataattgggaggaagatcttcaacccacctttccataacaacaccccaatcatcttgtgtccaaactccagtctttaacacttcttgaagatcttcttcatatttgaagatgaactgaaatcgatccctagacaaagctatgcctcttactctatcataaagacgccatatacgaggcatatctaggatccattttgacattctttgcttatctgggttcagaaatcttcccatgatactatttaaattcctctccgtggagaagaaattcggttgatcagaattaatcaaaggcgcatcttcttcttcctcaatcgacatcttttgcagacacttatccaattgaaactccattaagatgtcaatttaagtatttaataaacctgaggaaagtcttgatgaaaaccagacagaaaaaaaacaaaatacgaaactctgttccggacagaaaacggtgatatctccggtgaaagctcttctcagaaggaactgcctgagagagaacctaaagcaattgggacagcggtgatattgacggcaaagcaagaacacgtgatgcatcagctatgaaagagaacagaagatatcactttctctagttttttttcttatttggacaatgtttaaggaatagaaaatttcacaattatagataaaataaaaaacacttgggcaactcacaattctcttaactcactcttatttttcagagagagagggcgaatttcggttacccggaatccattccggtataataccggctttttgttttgtaatatattccggtcccaacgggtcggattttgtttttctgttttaccggatctttctccggtttaatcggatataataatctccatctttgcttcggctaagattggattctgttttttgtttatcctctttctacagggattcaaattgatctcctcttgcgatctattgatctccatgtttccccgtcaacttgactcttctcctttgtcggagtaatatcttcgccgcttaacttgaagaggacctttttaggtcttaggcggagcttccaacgagtagattgggttaagaagttgaagacttgatgatgtcttcttgtggcctttttcagacggatccagtgggtttcaatttgctttgcatggacgtaatctgtagaaagggagtggtggtggtttcccgaagccggcggcggagctgtgtcaactcgtgcagtttggtcggcaccgtccgtttcatcttctccttcttgcgtgctaacacgtatgttacacgtggcaccttctttccttagtcttttctaaaagaaatcgactaaagagttgttatttcaattaaggttgtaaatgttggggttgggcttctgtattctcatcattgtactattagttattgggctttgtactactgcccattgggcttccatattaatggaatttggccgacaaaaaaaaaaatcacaactcacaatgtacaaattaagattaattattactaaccatatttaaaaagtgtctactaatattttaacttttagcataatattgttataaaaaaaatttggaaatattatggggtcaagtgacccccctcctaatgctctagctccgtcactgagtgacatgagagaaaagaaaatgcattgttttattaagcaaaaattaagaaaaatatgagcaaaacataagataatatgataaaatataaaaaatataggtgtgtttgttaatgtttacatgtgtaatgtcaatatccacaaatttgaatttaagaattcaaagtttgtgaaacacaaactgaaaaaaaaatatgttaaatccgttagcaattttttttttaatatctaactttaatcccaatattacagtggagaatattattcaacttatgaaattagttattacattattttatcacacctaaaatataatcatgtttggataatttcgactcattttaaaaactttttactcttgtgttaaagcatataagatgtacaacgaacatgataatgaaaatacgaagtacataagagtttaactaaacgaaatgatataataaaattaggagatttattatttccatctcttttatatagtacaaaatgatcataattgacacggttgaactttgttttggacatgtacaatgaagtttattctcttcatcatttcctctttcttggaggttgttagtgcttcagaagatgatgatggagctgcaacgcttgtagtcttactttgcatattgcaaatgaaaaggtgagtacaattgcattaaccaccagatatatctattaacctttgtagtttatccctaggtggcgtgatttcaccggcgatcagttctctccctgaactagttgagattaacctccaaaacaactttctcacaggcgaaataccgaggcttccaaaacacgtaaaggtcatttacaaacccggaaaaaggttcctcatacacaagtcaagagataacaagtgactataggcatactcattgcaatcacaattggaggagcacttgtcttgatcaacatgggaatcatggtttacgtttatcagctcaagaaatctacaatggttgcaataaaatatataaaaaaataaacagttttcttctaataaaaatatctaaatgtcaaatatgggtttacaagttacaatcatgaaactctttggtaaggaagataatcaaaatatggatttgtacaattcaaacatgggcttctaatatgatataatctatataataataacaattttaattaatgtctttaacaattgtgttttcttttaatcgcattttttttgataaactagaaatatattttgcagttatttttttttagaaagttgcaatctggataaatgtcttctactgttacatctttttttaatcgtaaatcttcataaacggttgcaactatttagttaaagcattacaatatttaatttatttgaaaaatcattgcaatttttggtttatttatgaatcgttataatatttaataaattggattctaatgtaatgccaagttagattatcaaaagctagggtaatgatcatacatctcaagatgtcgcgaaaatgaagctagtaaggtaaaattcggcaatcgccaaaaaatcagagtctagatttgtaattttaattgcatcttcttctttttggtcaatagtaacatctggtcatggaaagtgttctgcaaaagtatgtttatgcagctcctagtagaatgagtacaagaacggaagaaacactacatgcttagacttttgatgatgataataaaagtttaccaaaaaagtgaatccaaaactgaaaaagaaagaattataacacttaatctgagattaataacttgaaaattttaaagcttaactcatattacaacataacaaataacatgcagtattctcaaaatctacatatacatttttggtagactttttggccaaaaatctctcaactatttactaataacatttagatccttacaaaatatatctcaactagatattctaatactaaaaatttacaatttgttagtttgcattaaatacttaaattaactcttttctatattacatatttagtccctacaaaatctatctaaaaaaaatatgtgtctaattaaactacattcaattaattactaatttcttaaaatttctctatctacattaaatataaatatatgctttttctttcacttttagttgttctaatatctaatttatttgattttatataaaatatatatagttaataaaatattagattttttctatatatgatgtaattcaaatttttaaaaacagacatatattactcaatcgatgaagaaaaaaaagtaagtgtaaaaagtctcacattgcttaagaaattgggcaacggttcagagtcatattataaaaagaaccaaaatgattttgaataagaatgaactggaagttgatttatcaggcatcccaaaataaaaatgttattcggtttaaagaactgaatctttaaaaatttcaaaatattataaatatttaactttcttaaaagtgaaatatcaaaaaatttataacttttaaaaagttatactttattaaaaaattaaatgcattaatacgggacaatatactacgggtgaaatcctatatataacaatcaaaatagaattataaagtttggatcgatattattattattatttttaatttcaataccataaacatttaaactttagaaaaaatgacaaaatgatgtttaattccacgtgacggggttatatggtgggacgggtttaagttgatattaatacgggatggtatatagtatgggtaaaatcctataattaacaatcaaaatataattatataattttaaaaactaagccaatgtaacaatattaatatatatatatatatatatatatataaaacttaaaattttaatttttttagttctaaaattgtctcagagtattatacgttaaaataaaataacatatgtctatatatcatcttaaagacaaaattcatttttttgataaaaatatacccatgtgatatacctcttaatatgttatatatatatatatatacatatatgtaatataatattaattaaaataaatcgttaactttctgtgtaccgcggaccaatctctagttaaatacattttgggacagttcttattacaaaataaaaaatatataaaaatgttacaagtttacagaaaattacaaaaaaccatggttacgtataaaatgtcgacccatatttagtgggctttgttggcttattgggcttttgtgtataaaaaactcatttatatacactcgtgagaactggaaggttccgtcaagtgattcctcattcccagcaactgtttcaacttccgccggcgacatcacgatctacagttccggcaagttattccattccgttcgatcaaaacaatgtagttcttcttcgtcgtcttcgtcttcttcttctcattttacacagttttgttttaggaattttcttcataagatttttgacaaaccctagcctgatcacttagtctcaataaggttttagttttagtttctcttcctcactggcgatttatgtttgcatgcatgtaccttttcttacagatttttcgtggtgcagaacaagaacacatatgtcttgttccaaaggattgagtcagagtttgaaagaagatagaataagccaattaccagatcctttgttaacacagatacttaatcttcttccgacagaagaagctgtgaagacaagtgtcttatcaaccagatggagaactctctggctttgggttcctaatttggaattatcattctcaaaattcccatgtttcaatgcctttttgagtttcggtaacttgtttttcgattccgatagggcctcatgcgtagagagcctcaagttgtatctagatggaaatgatgcatcttatctcaaaccatgggttgatgctttagttaagcgtaagatctaacgtctatatgttcgtcgtactctaggaggttattctcatgtgatgccactaagcctctatgtttgtgactcactggtatctttaagactctataggctgagtttggttgatgctgagtttgtttctttaccttgtttaaagatcttgcgtttgaaagatattgtgtttcataatgagactacttttgagagacttgtctcgtcttgtcctgtactggaggagttaaagattgatgtggtatggaatgatgggaatgtttataaggtgcactctcggtcattgaagaggttctgttttcgatgaagttcttctcttcggtttgatgaatctgttccgggagttgtggttgatgctcctctgttgtgttgtttgataatagatgatagtgtatcagaaagctttgtagtaactgatctggagtccaatgccaagtttgatatttctctctgttttcgtttgtggcgttttgacgaagctaagagaagtattatcaacatgtttctcgcttggatttcgagggttagagatatgaagatatgtgcacacactttcaaggtatgtcaatgcaagttttggacatgaatagtaaaagtttctaaaccacattcttacttctctggtttcagctcatccatcgatactcagaatcttcaccgctacctcgatttggttacatgtccagtctatatgttactctcaatgcatcagaattggaatggtttccaatctttcttaggagtagcccaaatctgaaatctctcatcttggtgatgatcttctctataaaccttatgattttatcatagctatgaagtttctgcatattgtttcatggtgttttgtttttcccctcaggagcggagtggttcttctcatcaactctctcgcaaggcgatggaacgagttagtatgtcatctgtacctgagtgtttgctaacatccctagagtttgttgaattcaaagcaccaatttgcggacttggtccagagatgatgctagtatggtacttcctaaagaattctcccaccctcaagaaactcactctacctttgaagtctcattcaaccaaagatgactttttcaagaaactcctcgaaatcccgagatgctctaccgaatgtgaaatcgtcatcctctgatttggtaaaagagcagagagaacattgtgaggtttcgtagttttatgtaaagacgatgtgaacatgcattgtagtttcatggttggtttggctttggatttcatttgcgtcttaggagtaaaatgaatgcaactatttaggtacttggctggagatatcagttgttcttagaagcaatttgtatcttttggtgattttgtgtaaagccaatgtggatcgtcgtagcagtttcattactacttggtctaatgatattatgatagcttaattattttgctcattcgatagtgaattttctatggcacttcatggatctatctatatctgttcaattgttataaaactctaagcaatgtcaagctcttcaagggaaaaccttctagatgattccaagtctctgcttaatgtgccaactagcctctacgtcactactttgtgtcgtctccaattctcatccttcttgacaagaccaaacgtatcactaatgttggagagatgaccaatgtttgttcatacatttgtttgtaatgaagacatatagcacaacaccatataacatatgatccattctattaattttgctatttttacagccgaagaagaagagtataagaaacatgtttaagattcagccttacacaagtgtagcagaagcaaaaaagaaaggctatcaacgaatgggaactttgatccaaccattggcaaaagcaatggctaagatgacgaatggcgttgacataccgaagatgataatgtaaggaagaggcgtcttcatcggattctctccttctctttctccaacgctttgccaatacctataaagttgtaatgcaaatctcatccataaccatttcgtcagtcacaatattgcatgtttatgaaaaatgtgcatgcaagagtttaagattcttttgactaacttacaaaaaccaaatattttcgatcaaatttatggttcgtgtattgatacaatactaacacaaaccactagtctacatgtcattgtcacataccaaacaaaatctaaattctgcaaaggagactaaaattacattaccatccaatgagtttctgtttattttctacaatctcatgatggaaaaaattgagaattaagatgaactaactgttctggttcttcatctttggtaatgaacttcttcttatctttaggcttcacttctccatctcctccaccttaagcaagaaccaaggattaacagattttcatctacaaataaataaaagatctaagagagtacctaacttggcgtgaagcttgaactgtgggaatcctaatggagatggtggacagaagaattgaggcaaagcaagcaatgatgaatatgaagaagatgatgaggttatggaatcattagttctgtggctaaacgaagaagagggaatgcagagttttgctgccatttccaacaactaaacgttttgtttttgtatatgattttttttgtatatattagttggagatatatgtggcatttgtagtgacatttggcaaacttgtagactaaaaccttatcctcttcttacctctctttgtgttctgattttttgtattagacactccatttgcagtggaacatttgaactaaaccgaatcaatttaataaaagagagaatgtgtaaaccaggcctttttaaaataatattgtaattgctgcaaaaacaaaaaaagtttaagaataataattttgcaattaatttaatggactagttatacaaaaattaatcagcttttatatattttgcaattatttgaatccattacattatgtatgtcaattgggctgcttggacccaatctgaattagaatttcaaaacccacaaatctttcagtcttgcccaactcattttactatcttacaaattcttgttggcaagaaattagttttggaatgaaaattatttgtttgagctttaaaagccggtccaaagactctaactcgcttgggttagacccaataaaccttttattctgaacgaggtttgatcctacttgactgtttctgaatcttattttgcgtatatgaagttctccttgatatgcctaaaatcccttcgaggttcatgtttaaaggtaaatatgtgagttataagactcgtacttttgaacttttgatctgatttttaaaccaatgattaaataacaatttattgtaaaatatttcaaattatatgaagtataatttaagtttaaaatctaatttgcaaaggcaattaaacactattagtacaacatgtaattatataataataataataataataaaaacataaattttgattgatttttgtttgagtgattattttggttatgattggtaaaataccctcaaaccacatttaaaaccatgagatgcaaatgttttgtattgttaactaaagaaatcctctaaactgtagatttggaagtctattttaaaatcactagttcataaaacactagatttcttaagatttttttagaattcatgatggtcatttcaacacaaatcattttaaatgtttgattgaatacacttccctcatttttggaagtaatggatatgattattgccaaatagaaactattaatgatccaaaacatgatttgtaagataaggtttttcacattaaatttctgatgatacactttatgctatattatatttgaagtttagactaaatacaaacacctaaagagattgtaagtatgtgtgtaaatgaagtaacgtatgaatgattaaacctttaaatagaagtatcctcttaatcaaataaacgtcatggaggatgatgcaacattctaacgaactattcgcataaagtttgattacaaaatttgtaattaaagcaaataatatcgttttaagaaaaagaaaaaacacagcagtcaacaattggatggcagaatcgtaaattaagtaacaattgatcggtgactaaaaaaaaatgcgaaaccaaagtcacgttaagactcggcactttgctgagagattcttcaacgactccaaaattttcttctccttccctgataaaatctcgtgtttttacgagtacccatttcttgattccttcagaaaactgcttttttttgttgatctggaaatttgtatcgacgatctgaagtcaaaggtcgagtctttgtctttgttgttgattttgtttcaattcgtgttgcagctgatttgaatagtgtaaaggaagcaccttttttgcagaggctaagtgggttttagagtcttgggttgtttggtgtagattttgagatttggttcagttttagtaactgtggtgatggcaaatctttggaagaagcagagattgagagatacaggtttatgtcgtttagggattctatttgctgttactttgtctatagttctgatgttggtgtctgtacctagaactgctttgaatggttcttctattgacgatgatttggatggtttagataaagatttggaagctaagcttaatgcttcattgctaagtgtagctagaggtaatagaatgtctctaaggttgcatagaaggaaccatttttcgcctagaaatacggatctgttcccggatttggcaaaagatcgtgtggttatcgtcttgtatgtgcataatcgggctcagtattttcgagtcacagtggaaagtttgtcgaaggttaaaggtataagtgagacattgttgattgttagtcatgatggttactttgaagagatgaataggattgtggagagtattaagttttgtcaagtgaaacagattttctcgccttattcgcctcatatatatcgtactagcttcccgggtgtgaccctgaatgattgtaagaacaagggtgatgaggcaaaggggcattgtgaaggtaatcctgatcagtatgggaatcatcggtctccgaagattgtatctttgaagcatcactggtggtggatgatgaacactgtatgggatgggttggaagagactaaaggacatgaggggcatatccttttcattgaagaagatcattttctgtttcctaatgcctatcgtaacatacagactcttacgaggctgaaacccgcaaagtgtcctgactgttttgctgctaatttagcaccgtctgatgtgaagtcaagaggagaagggcttgaaagtttggttgcagagagaatgggaaatgttgggtattcttttaatagaagtgtgtgggagaatattcatcagaaggcaagagagttttgtttctttgatgattacaactgggatataacgatgtgggcaacggttttcccgtcgtttggttccccggtgtacacattgcgagggcctaggactagtgcggtacactttggaaaatgtgggttgcatcaaggtagaggagatgagggtgattgcatcgataatggggtcgtaaacatagaagttaaggaaacagataaagttgtgaacataaaagaaggatggggagttcgggtgtataagcatcaagcgggttataaagccggtttcgaaggttggggaggttggggcgatgatagggaccgacatttatgtttggattttgccactatgtatcgttacagcagtagcagtgcatctccatgaaactttagagacttccaagtaaaggtggtaatataattgagggattgctttcttgttatgtgcttagtgactcaattagcttgttgtatttttgattgttatatcttgtttgtatcacctgaagtatttcactttctatacgagcttttaccgccttttttacttattgaaaaatagattcaaagtgatgaaatcttaaggcagtacagggatttcagatttggtattaagctggtctgcaaaagctctttttttttttagccggacggtgatagaaggtccagttgaaggaatttaaattctcaggtaaatttgtgtatgtgcttgggtttagatgataggagttgggcccaaactaaacccacaaagaccttttgctatgactcacacaaaagttggcgtttttctttatttttaatttttcgtactgcaaatgttaaaacggattctttaaccaaaaaattcgtgtcgaaccgcatcatattacctatgtaaacaatattcgttacaaataactttttttttttgcataattaatatcggtcgacggagaaaaaaaaagttggcttatgagtgattatgctcctaaactcaacattagttagagaatatagataagctggttctgtattttgtttcatttgtaaatgtactagtgaggggaaattttggaacgtttcatagatattcaactttaccatagatcattttgaaatgtctataaacgaaattaatcaccttttttatacttacttatatttttcttaactatattttttctaataatcaaaatcgttataggggaaaattcgttgtattggcctagctagttaagaacatcggtggatgtttttcgagtttttggatatttaagttggttaacacatttcactccagtaaacggaccaattagaaaaagccacatatgagtctttttcactccaaaaattcctaagattaaggatgtctattaacaatattggcattttttatttattttgagcttttttttacggactcatacatttaaagccccttagaaaaccaccattagagatggtctaaacgctttctagtcaaagggcactggtacccatagtctaatatctttaagatgaacaatttacttgggtttacaatcgatatattttcttatttttgcatgcataggaaaagagatgtaataatattagacaaagataaatctaaaacccgatcattttaatacgagacttggtaagttttggaaacaaaaacgataaaaaatggtttattaatttgatacgacaaaaactacattgtgattcatctagctgcgacgaggatagtcaaaaccacaactacaacagcttgtaccagtctgattatgataggttatgagaccacacctagaacagcttgtactaggagtccgagtaagagaagccatcattacctccacggcaagatttgggtaattatcaacgaacaacttgaactcatcaaagctaggaaacataagttcatttgttttaatataactaagggctgcatcgttgaggactttgtcaaaagggatttgtgcgagctcaagaaggttaagagaattcgtcgaattcagagaagatataagctcagatctgcatagctctcgtagtcggagaatctcgtatttgtcagccgcacgatagagtgcccgagcatgttgcttcactttcgaagaaagcatagaaccatcactatatagaaactcaacaaaagcttctagctcttcttgtttcatctctaagagagtgattgttcccacctgcttagccgaagtcttgaactcgtctgattctagcatcttcttcaaaaccgccgatcttgatgcctattcaaatcccaaacatacttgttgagagaatcattacaataaccacaccaacccaacaaaaaaaaacttcacataaaaggaacactcactaaacattaacatttctaaatttaattgattcttgaataagatgatgatatcaataaagagaagatgaaaaaagaagagaccagaataactttttgggcagagataattgaaccatcatcactatccactgccttgagccgtacgtcaacttgccaattttctgccaagatcttcgcaagtccccagagaaatggtcttggttggtttgtgttgccatatcaataatgtaacgtatatttgaggttgtaaaggatggtggattatatagagaagataatgacaattgaaaacggtcaaaataactttttacttttcctatctgcttccaattttcaagactttggaaatgactttttatatttcccatctgcgtccaattttcaagatttggaaatggataagacctatcaaatatatattagtttttttttctggaatatttggcaaaaaaccttggtctttcaaagtatttatccaaaataccattggcgaatcggattaaaattgaaattgggtcacaaaatttctgaaatcttcaattgatatgcacaccaacaattaccatttatctcgctttctctaactaaatttgtttttgggtacaatttttatagataatgaaataaagtatgactatttactgctaatgtaacaaactagatattgacctgcggtacactgctgcttgattattttcgttttgaattaatttaatgtttcaattcaatatcatctatatttaaataatgatcttagatattcaatttatcaaaactcattgtttatatctatttacacttagtgattatattagtatgtttctatatggttttgtatagttccggaagcatatatattatacgcatctatatacaaagtgtgtatctcctaattttatacgtatctagaatgtgacccgtggtacaccaagggttaagttttttgtttattttaaatttttacaaaatgaagaatttgttgtgtacaatgtctattgttgtttgtgttgattaataatttttgataaagttgtgtacggtttttattaagtcataagtttatgatattagtaagtctaatattattttatcttctagtatatgtcccgtataccctatgttttattcacaaatttttgtattttaaattatataatttaaaatttctatattttttaattttacccttagaacataggtaatttaataattttttattacaattatatatttagatgtgttaaagaagattaacatttagaggtgtgaaagaagattaacatttagaggtgtgaaagaagattaactcttattttgatatactatagtgttgttttttaaaagacaaacaaaaaatctctctcatccaaactcatctcaccatataaatctgtctcacatataaactcgtcccatggtaactaaaacttatttctttttttcttttatttttaataatatttttatttaaaatattctgagttagtttaaaattttcaatctaatgttaattagtcgtaaagtttccgtgattatgtattctaatgttattttgtattttatatggttttcttgaattagatttgttttatattaacattattatttcttaaatttctttgcatcattttatttattaattaataacaaatactcgaaaaagttatctaactgatgaattggaaactaattctctcctatccaaattggaaaccaaaattctccttcagtttgaagaacatgatctgattataatcggttctacatgtcaatagcttccgctaatggtccaagttgaatatacttttgggtcaatcgatgtgtaagtgattttgattctttgttgatgtttgtaaatatagtttcattttaaatatgaatcgtaaccccatggatatatttaaaccgattgaccattccgattctaaaactaatttatttccagtatttttaatacagaaaagaaacttataattttaattgtagtaggttgttctttatagaacaaagatgattgttttgcaaaacaatttgtctaatctttagatgattgtacatagatgaatatattcaagctttgggaattcattccctgaagtactgttatcaacaaaaagaagataagaaggaccgttcaacgacagaaggacagttgatatgaggcctgcttccaatgctggcttcaaagtaatcacaaagcttattcattctacattctgatttcaatctactgttatacgttgcactcgttgtaaaaacgctatttttttttaatctaatttaatattattattttttttaaaaaagaagaagataagagttcattatctaatttaatacaaaaatatatattcaccttaatatagatattataactaacaattgttttatttcatagctgaataacaggtttaatgctaaagaacatatctcaaagtcacttatgtatcgtctccatcttaaagtcacttctgtatcatctccttacaccaatcaaaggttagttataatgtaaatctttttaggcagatggttcaaatacttatgagtctgatgatgaatcatgccaccgtatgaataaaataaatcagagaaatctatattaacatcatgattacaataagttaaacacaataagataaatcaaaaaggaaaacgatttatactaaaacagagtgtcagataattacatgtgcaacaacttcccaatactaactatagtgtttcaccagttgtgttggtattgtggcgccacgaatgatgtatttttcacctgcactcgccaagccgtcttgcacggcctgatgagaacatgttagtacagttggccaaatgaattacgaaaatgggctatgttgaaattgttttcatgggcttttgaaagcgagactagacttgatcttgcaagttctccttattaatatttatataagaaaggttgttgtaattcttgtagttttggttgaagatcttcaattgattgtcatttttttttctctaattagagagatatattagtatatatagatagatttatttccctaagattttaagatgtccctaattagttcaaaggaaataaataaaaagcaatttaaatagtaaataatctaattcatatatagagatagccattaagctttgttatctcattgttttccatttgcccccacacatctcctgtttttcgtttttggtctgaattaatataaatttctattgtttgtttatgttgatataaaaactataatcattacaagactaaagaaaacacaaaagcttttgtaaaattttattatcaatcatgagatttgctagtttgtttgtggtttattgtactttcatgttcctcgacataagccatgtcaaatgtggtaagcaatataatgatatcgattgttacaactattttcttctttcttgataaaatttacatcgcaagcatcgttgtggtaaaataaaaatgctaatcttctttcatcattagtttattaatctaagacgtattatcaatatatagttttgacaatctttgtggttgatataaatcatagaggtggaaccggtgccatattgtaaagttatcacatggtacgatgttaaatgtggtgctgatggaaacaagacgtgcgtagaccaccttatcaaagggcatatatatgacgttcctgtttgtgattgtagtgagttgacgacatcaggaattctctgcacatgtcaacaccgttttccttgtaaagagccacctccgttacatcgtatttccatcagaaaacaaatccggggataaactagaagattgtaaaatttaataaaatgaaaactaatattacatgctgtggtttcgggcttggaaggattatgggcttcggcccagaacctcctgatatttaaaaaaaataaaaaaaaaaataaaaaaataaaatgaaaacatttttaatacttcatgtgactacaaaatttgttagtagtaaaataatcggatgatcttaaaaataaatatatatattattcttcaaatttcttaagcatgacactcacggctttttccaactcgtggtttttgtctacgttgttcacatgatctacccttaaacatagtatcctctaatgccaagttaggttgatagaccacttgtaaatgataaatacatacatgcaagacacccaaatcatcgaagtttggtcatagtgaaggaatggtcattggtgatacatctcttctgtttctcaaaccattcggttatgtttcttcttaaccctaatggtcggttcggtttggttcaaaaccaaaccaaactgataaccaatatggttatttaattaattaataaattatattaataatattgtaaataactaaatatgtaattcttttcatagtttaattattcaatttaaacttacaacttgaattcattggttactttaaattattattaaattcaaagttcaaaccacaatgaacgaaagaattttgttttgtcacattaattgatttttttgaaccgaactaaaactgaaccgaattaaacttaaactgaaccaaacacataccaaaccaaactaacttcggttgaatttggttagagttctatgagatccaaataaaccgaaccgaaccaaaccccaaccgaatccgaagttaaaacaaaaaaatgcccactccttaaatgacacgactgtagcgaccctaaaccttactagaaagaagtccggctaggttcgtacaggtgacgagtacttcgtacgagcatatcgggtttaagcacaaaactagcgccccaacctgccaatacttagcattgtcccttccaatatcgatatccggcttgtcatcccttttaccgacaaagaaagttatgcggttcaaacagactcttatatcatcaaccatccctactttatgaaaaccattttatatgtagtagaaattttatacaaacagataccaatcaaacataaaaggttcccgaagatcccatttcacaaatacataatacacaatagtatcctttacacttctacccaaccaatctacaccaaaaacctattgtcccaacgaaacctttatggcttatccctctaaggttacctgcaacaaaaagtgtcatcatgaatacgagatactcaacgagtttggctcctaatatcgaaaataaaacacccaaagccccaacaataaaacgttagataaggcaaacaagaaataacaagcaacaagcaatcaatcaataaacaacatgcgataacaacgagtaaaatcagagatgcaaaggttatgcaatattaatgatgcatgcatgggtaaatgataacaacaacaaacctgatggccatgtgaatgatccttcccatcgaaacaagtgaacaatccgcctacagccacaaagtgtataagcgatgtaccacatttgccttctacgacggagatcccagttacatcgtcatgcaacactcagcctcttgggagcgacccagtctctctgagaccaatgaaaacaggaaagcgcactcgaacacaacaaactatatatgcaaagcaactaagctcgacgaagcgtacttaaagcatcaagcatactttacatgaactataactccatatcagttctacgatcaacaacaacaaagcacacaaccaacaaacaagcacacaagcaagaaaaatcatgtgccaccttacatgcttctgaactcactgtgatttaacgaaacggatgtgtgatgtgatgacttagcggaatctcaacttcagatctgaaactctcgatcttgatcatggaaacttcttcttcttctgtaaaatctctcacagacttgttcacggaaactacttatttctccagaattttgtagactccctccaccgtcggctttaagaacgagcagcacttctccgaagattttagagagctctttcacaagtggcggggaacttaaacctagggaaccactcttcctctgattggctcggagcttgtgttgtctttacttcatttacactagatgggcggtgaattatactcttggcaacatttttcctctgattgggtcagagttaataccatcattgcctcgtttttgccaaaagaggtaacttatacccttagcaacactcttcctctaatttggtcgtagcttcagtcatcattcccttgttttcgccaaaagaggtaacttatatccttggcaacacgctttctccgattgagccccaaagcattggttgcgccatgtggtggaagacttcttccgggaatgaatatatatatatatatatatatatatatatatatatatatatatatatgaaattccttctgaatttttgggattattctccaccacacattatcttttagctgcatcaccccatcatggcacggttaaggcttagttcgattttacttaacattttcgacaacttaaccgatcataagtctcctcatgactcgttaagacctattttaatttccaaatttatcgaacacgacgaatcactcactgaacaatccccgacaagtttttatcgatcaaaacccatctttccccgatacctatcagcttttcatcgtcaaaaagctttcattcatgcccatgtttgataaacgcgaaaggcttttactttttcgttaacttcaaattttttgtctaggacgtgatttcacggccgcccgcctcgaccaatcttaagtcaacatcaaggttactacaatgattgttcacccttattaaagattgctttcgtctgttctcttgaatcgcgaggcctgctagccctaggcaaaatacttaaagcaaaagtaaaccaaactagaatcgaaccaaaaaaagaagaacaaaaccgaaccgcaaccgagaaactaaccaaaatatttggaagtaaattaaaaaccaaacatacaatatacagtatatctagttacttttagactgaataaacaaaatatactcaaataatcaaaaaataccctaatacccaaaataccgaagatacccaaaaattaccataagaaaccaaccgaatagacctaaaatatgttacatacctaaaaataatagaaaagtatccaaaaatacagaaaatacccaaacatatccaatatgttttggtaattcgggtattttataccccgaactaaagaataaccgaaacatttttgtttcctaataattactcgaaagaaatggtacccaaaccgaaccaaacccatttccttcgcttcattgtataatcttttataaattaatactttataaattaaaatctcgataaatcaatatattttttgggtcccaaattacttttcgaagtaattagtatatcaataaataaacaaaatatatgagttgcaatagtattaacttatggagtttttattgcatatggaattatgaattttaaaaggtaggaatcgaaagtaccggaacatagctggtatgttctcaattagctcgttacccaaagaccctcttatcttttggtaatgtgctaactgagaacgtacaagctatgttccggttcattcgattcttgttaagatcaataattccatagaagctcttaccttgggtagctcgttacccaaagacctcttatcttgggtagagcatccttagctatagatggtgctaggatcaacgtgaagaagggatagatctctctgaatgtatgcgatgttgtgatgtattttgacatagatggaataaggtctcaaccaacaatcaatggtaagtccttatctgttgacacctcaaaggaaagagcaaagatttttcgttcaaggttacaacagaagctcctaccactcagctcacaagcaagagtcgtctagtagatacggagtcaaccaacaccaacactagtgtcgatagacaccaccatagaccagagagagaatctatagattccacgatatgttcccaaaccaaccactgcatctctcctgcaccatcctcgtattgatcaccaatggtattgttcctcacctcctcatccttctacttcagtgattaattctttcgaatttccgaagtgtgcttcacgggttaacgagcctcaaacttcttgagagcttgttccttctgttcgtgatgtaggtcatggatctaagcaagctgcaactgctacatgtttccttggaaacaagcatggctccaccgcttatacaccaccatggctgacaaggcaacaatccacagagaagcaacaaaagtattctcctagtccatctcactcctgaagtctaaaaaagtcaagctatttactaaaaacaaccacttagtgggatgaatcccactaatatgtttctcgttttttttattatattttattttaactagatgaacacccatgctatgcatgagtttttgtttttaaaatcgtcgaaaaatatgattatgggtttttgttgattttgttgttcattttgataaatttacctatttaatataattattatgttttatgattagattcatctatttctcgaatatcaattctactacaatatgaatatttatatatttattattctaatatttcactatcatgatcacatactacaactatatatgatatactgatacaatgtatttagttatattatttatgtgttttgaaacttgcctaacttaattgtaacaaacaattctttattccatatattctctcgtcatctagtacacaatcacatcatgatatgctagtaatttaagtcaacactttaattctcatccctaccatatagtcatatagagtttcatgttgttgtttttttggtatgtctaatgtcttggatgactattacgtaaaatgtacagaaagaaggtcatatgataaattaaattcacaaaacgtaataataaaaaaatatccaactaaaattactaaattaatatgaggttaggtagcaaacatctaaactacaacacaagtaaaattttagccattatggttaatgactattgataaaaaaaattttaatcaaataagtagaaaagaatgaaagtagtgcttggtacattattatgattttttatttattgaatgtttttagaaaatacatttaagagtgagataaatagagagtttaacacaacaaaagacttttcattttttctcaattagttttgctagttttttaatttaattagtgtagaatgacacatgtcattttcttgtgtgatgatgtgtcactcatatggagagtgttggccaactttcataaatatgatttttattgactttatatatgctttctataattttaagcttgcataatgtttttataagatgtttctaagatgtttataagcttttataagatcttttttttataattttgtatggtttataaacatcttatactttgggacggaaaaaaaaaacatcttatactttgtaaattgatatttcttttttgggtttctgtcaataagcttggcttcgtgaactgtcggattgtttaaaagcttatagtataaggtttttataatgggcttatattttataagatgtttttaatctttttataaagtgtttccaattagcttattacataagtttatcaatatatatttttttattatctcagattgggtttgtacagaagcttttgtaagatatttataaaccataaaaatctgagcattccaataaataatatatgtatcaaattggagcgtatatgagaaatcaaacatctgataaaacgtattacaatgaaagcttatcaaatttataattttttataacagaatcttgtaaaagcttataaagtcttttaaatattttgttaaaaaaaagcttttttattaacaaaatataatatcttacacagtggtaactctcgagaagacggagatagcgatcgaaatagaaaaataatcgtccctctgttcctaattaatctaatttctacacttttcacacatattaaaagaacacatcaaaaatccattaaaaatgttttggtttttgtaatttacaattttcaataattctaaaccaatcatattcaattgttctttttaaaaactacaatttatcactaattaatagtgcattgaaaacttaaaaattgtatcgttttgaaacaaaaaaatttctagaaattggattaatatggaacagaacaaagatagcgatcaaacaaagaaaaatagcaaagatacgttttttaatcgtccgatacgtttttaagtctgttcgtttaatgtttaattgtaatttgttcttgcccatttggactttaatgaaattaaagtttgttgggaaaaaaaaactttttttggaaacagacatcattcttgaatttcgccccaatactgctttttctcttttccaagcagaaaaggggaattcgccgctcttctctcctctggttctaagcgactctcatcattcacttgtatcagacataaacaaggtatgtctcttaattctcccatatcatctcatctcatatctttgtgttcatttgcttgatgttctgtgcttatgcagttgtttcagatgttctgatgctatgatattaatcgtattctcattttcatgatttagctgaaaaatgagaagttcatttgatttgctttctgttctgtgtttatgcagattattgattaaccaattaagtgactctcatcattcacctgtatcagacataaagaaggtatgtctcttaattctccctctcatctcatctcatatctttgtgttcattggcttgctgttctgtgcttatgcagttgtttcagatgttctaatgcaattatgtgaatcagattctctttttactaccataataccgaaagttgagtaataacgcttttcttagggctagcttccgagtcaaactaattgtcctatagatttcttgaattcattaatctcttgtaaaacaacttatgggttgggttgtgtttgttcttagttgtgagaatttgtttgatgaagaagagaggactccctgatcttatttgatcttattttgtttttgatagatgaatttgtgtagatgtggtttgcctccaaagattgtcacatcgtggaccgataaaaatccgtctttttgcttgaatcacttcttttttttccaagtttttaccaacatatctcggtttagaccaagtttgtttcacattttgtgtgcctgatgcattattcacattgtgtttcaggtgaggccaacttatacaatgggagagcagaagaaaagtactaagacagccatgcacatgaaaaaatttatgtcttggaaagtagatcgaagagtatcagagcttgttcaagctacctacttcaagaactttttgaagtttgaagaatctaaacataagctaaatctgccgcttcttacagcggtcatgtcattctttgatgacaaacaaaaggctttttcctttccagcagaaaattccatggttgattttggcctggaagacattctctacattacaggacttccaattgatgggaagcaggtatatctttttaattttacttcttactagatttgtcatcagcgaattccatggttgattgtatgcttgcttggtacatgtatcaggataccagagctctaaaaattaagtaaagaaaaggctcagagattgtcaaaggagagaccaaccagtaaggccttcggcatttctcctcaccttttgcaaatccaatttgaagatgtcccaaagaacattgaagaacagaatttagagccatactttatggcctatctccttttcttgttggtaactttggtcatgtcaaacaagacctaagctatatctccaatgtttcttccactgctacgaaaagacaagctcaacaaatatgcttagggggcagcaatgttggctatcctaaacgaatctttatgcgaatagaaggaggcttttactaaaggttccaccacaaaactctgcggttttgcctttgctctgcaggtaaagttttcaagtgaaacaaaaactaattatgttgatgttgattatgtgtataatgttaactactctttattatttcgtgtaggtatttgcattagaacgatttactgtctttcaataaccatctccatccagttttcttttaatggttgagtgggaaaaggtatataaaccgtataccaaaatttttgccagagggagtctgggacactatcaagagatccttcaaaacatgaaggaagatgagctacctaataaaatctcatctctttgtcagtatgcatttgttctatattaaatacttagattatattatttcagattaagtggcagccttatagcaaagttgaattgcccgaatacacctctcaattgcgtatggtgtttgcacaagttccatgcatctgctttaacaccatcgcatacaattgtcctggtactttcttcaagcaattaggacaggaggagtcagacatacgggtgccaccagaaataaagccgaatttggcgtctaagttaagcagacacaaagacaaggactggagagagcataacagtttctactcacagatgaatttggcgtgggaaaaacgagataatcgtttggtgtatcaacgacacaatgaggaatctgaggtgaggtgattttaatgttttttttcagtcgattgtgtttacatgtaggtaggaggaaactggtttttcttttttaaacacaagtgcttcatgaaacacatgtgttttagataatgtgtttctttttctaacagaagtgcctcatggaatccacttggtctatactgatttttttttaacacaactgcctcatgaaacacctgtacgttatataatgtgtttgtttttctaacagaagtgcctcatggaacccgcttggtctatatatttaggttttttaatgattttttgttttgttttgatagatgaatttcggcttccattcccggtctatctcaggaagaggtggagttgaggccatcaccaatgatccggtatttgttgtgtttaaatttttttatctttttatccccaaatgtttatatattaaacttatataaatggtgaatctggataggttgataatcaagatgaatcagatgaaatccctttccctatctcagttgagaacttcacaggtgccagcaacaatgatcaggtatttgttgtgtttaaagttttatctttttatctccaaatgtttatttaataaacttatataaatggtgagtaagtcaattgggatttatctgtggtttttcttgaattgtgtttatgattatttgttttgtttgatagatgaatctcgatgccccttcgccaactttatgatacgttttagaacacaaactatagcaaaagcaatgtaaatggaagaaattttattgataaaagaaagatacaggttttaagagatttgcctagagtctcttccctcccccttacaccttgttttcactcaaatacaagataaaccctatctctctcttcctattttcttatatagtactatctgccctcatcatctcacagagcaccgttacagtgataagcaatgagaatgtgacagctaataactatgattaaaccttaactctagtaaagttcaccttaagttctagagtcttcctttggttccttcttcttactctttctgctgttgggtcttgggccttcttttatattgctgtagaataggtgggtgttgggcctcatacgtaacactttactggctgaagaccagtctatctcatgtagagtagaggccagcaatagtgatcaggtatttgttgtgtttaaagttttatctttttatctccatatgtctatatattgttttgtgtgtatggatttaacgaatctagaccaatggataaaggttttttttataattttttgttttgttttgatagatgaattcaggctcctatttccagtctatctcaggcaaaggtagagtagaggccagcaccaaagatccggtatttgttgtgtttaaagttttatctttttatctccaaaggtttatatattaaacttatataaatggtgaatctggataggttgatgatcaaggtccatcagatgaaattcattcccataatggccccttatatataaatgatgaggagggagcgaatgaaacggtttgtcattctcaataatgcaaatgaatttggttttgtaacatatattctaggatattaggaaactaaatataaataactagcaggaaagaagctatcctcgacctcttcttaaaagaggaagagacggaatacttagaagtgaaggaaaattaaaacaaaggttatatttactccatcttctcgcaccagaaaaatgcaggggaacaagaaacaaaaataccgcttgatagcctcgattttgaaggaaacgaagccaaaaggaaaagaaaatacaaatcaaccttcttcaatagtttagttttcttatgttcttgttacgtttttattcagatctttattcagttaagaaacgaattc

SEQ ID NO: 172 - DNA, 43982 bp, Arabidopsis thaliana
  modified_base (15)..(15): a, c, t, g, unknown or other
aattgatacattttntcaagtttttctattgtttaagtttgttactatttggatagttaaggcgtgcactaatgatacttgttaaggatcttttttgaaatctctgccgacagagggatatatagagacaaatctatatgcactgaacaatagtaagtatagcataaaaagagcaatgcgttatgcgtagaaactactataggactttcattttagagcgtgcaaaacttttgcttggctatcgtgaatacaaatattctaattaaatttctaatggagcttttgactgacaaattgcttggctatagatacttaattcatgccgaccgcgatcgaaatatctatccatgcaatttatttaatcagtatccaagtcactgagtgtagtcttgtaggtaccatctttctacttgcattttactcaaaagtgaatttcttagcgtttgcctttggcaaatttgaacaaagttcggtcatttcatagtaaagtaaagtatctgtatttaattctaactacaaacatttctatgctaatatatatccaatatttcaataatttaaactttatatctaaatttattgaatcgtgtgaaaccatatatcttttctcatggctactgacgtggatgccacgttttttacgacgttgatgtaatcgttgccacatatttgatgaagttgttgccaatatattaacacataaaatattgttagatatgaattgattactaatgaattagattgggtaccgattttctactagtttgatactttattgtatctatctatatatctatacaaattactatttgagaataagacaaacgacttgtgactaataaaacaaacaaatacacttatactaactcatattctactagccactacaattcacataactgattttatgatatagagaggctagagtccaaatgggtatatgataacttcgtaattatcaaaaatacataaattttaatgatactcctacagtgattgataagctgtataaaaatcggaatcattagcggaccaagtccaagagagagcatgaaatttaaaattacacgaaaaatactaaaatagtgatgataaagtatcactaatcaagtgaagcgatctggttgtcgacaagatctctaagtttcactgtcacgacccaaagtcctttttccgcattttcagacgtggccaaggaaggttacttccttttctctttgacacaagagtcattttttttgtcgtttcctttcacgttgattgtaaagagtaaagattatctagaaggttgtactaccatctaaataataaataattaggtgggatgacaaaattttggagtaaaagtaaaaaagaaatgttgtgacctagttttaggataattttggcatacatttaaatgttatgaaaattgcaatcttattttttgtaacatatttattcttttaaaaatataatatactaattttttacataaatggatgtcataacctagaatttagaagttcacataaccacgttagaataacatgttccattaaaaaatcatgtttccttaaaaattaaatggaacgaattaacgaaatatggaacgaacttttattttgatgtgatttgagagagatatgacacgtacctgtccatgtcaaaaagctaaattatcatcatttcgcaattatctacaagaaaaaaagttgtaaggtttctaggaaattctccagtattagtctctgatatatattattaggaaccgacaaaaaaaagatatatattactaggaattgtttcttacgtatcgatcacactcgtaatatataaaaccatatatattttttaactaattcactataaaacgtcaaatgaatgtttttcatattatcggttaactaatcggttcatggagatgtaattttaaaaacaaatctaaaaatatatataattttatcgagatttttcttttttttgtagttatttaagaaacaaaaaaaattatggtgaaatgttgagattgcaactagtatatggctgacaattcagccaaactctagatattggatgcacgtaaaatatcgtccaaacgatgctaaagtattatgatctacgatacaggttgcatggtctatttaacatatagatttttacaattaacacaaattaaacggtgctaacaaaaaaaaagaaaaaagaaaagaaaacgcatacaaaggtaaacctgataaagcattcagacaatcaaggatagtgcttgttaaatatggctagagactatgatatgagtagaaccatatctccaagcaactaatttagatcacggagtacacatcaaatacacatcacgaatattttgacatgaaggcagaaggatatattcttctattaggatcatttctttttttatattattgattttggaaactatttacttggttagggttttatttcctttcctattattgtgagactcatcgaaagcaaatgaagctttggagggttcgatcgggtaagagagagaattttattcttgttatatcattcgtatatgttacatatatattctcgattatcattctcttctaagtgcacttgggatatcatccatgatctcatcgaaggtatcatggtcaagtttaatttggtttcctcaaggtgtcctggaatactctttaattgtttggttagccatcaaagacatgtttataaccgagacaaaagatacgacgctcgggcaggtactgtactcaaatgacccggaataaagctggactgagccggaccaatcagttttggtatcactttcttcatacgcattaccatcgactttgaaataatcttaaacaagacattacaaaggcttatcggacggaattgtgtaataagctctggtttttccaccttagcaattaacaccaacagagaatcatttgtttcttttggcaagatacccgtcgtgaagaaatccaaaacaaaacgattcactgatgttcccacaacatcccaattttgttggtaaaagacgggttggaaaccgtcaggacaaggtgctttaaacttacccatgcttcttatagccatttccacttcagcattcgaaaaaggcttacacagatctcacaactcttctcccgtcaacagcgcaaacccgtcaggtggtaagcattccacaacaagttccacatcctgcattgagtatagcctcttatagtaatccaaatctagcttttccaattcatgagaactcaccacccatctaccctcatgatccttcaaagcttcaatgcggttttttcgtcttctaataatagtagaagtgtgaaaataagttgtgtttctatcccccaaagctatccacgtttttctagatttctgaaaccacaacacttcttcctgttcaagcaccacctccaactatttgtttcaaacttacaagtcatttaaagtataaaaaaatatcttttatatctatatatatatatatatatatatatatatgtgagaggtagaatataatttttaattaagactttggcttactatttataaagaaatatgccataagttttaattgtggttttgttttgtttttaaatgttaagtagcaaacagttaagttgcaatacacgaaaatttttagtcgttatcaaatgactattaaaaatagcaaaataagaaaaataaaatgaaagtagtgtttcatacattaaaatgattttttgtattttttcttttaaatgaagatatttagttaagagtgggattattaatggatgattcaatgcaatgtgaaacttttaattttttatcattagcttttattcttttttaataatattaatttagaatgacatgtagcgttcactggtgtgatgatgtgtcactcatatgcagagagttggccaactttcatatatatgattagatgaacacccatgctacgcatgagtttttgtttttaaaattatcgaaaaatatgattatggtttttattcattttatgtttattattgtgtaattaataaattcatatctattttatataattataatttttatgattaaattcatctataatttgaaatatcaattttactataatataaatatttatatacctattatcctaatttttcactatcataaacacatacaacagtatatgatatattgatacaatgtatgtagttatgttacttatgttgtttgaaatttgcctaacttaattgtaacaaataattctttattttatatattctttcgtcatctagtacaccaatcaaatcctaatatgctaataatttaagtcaacactttagatatcttcctccgcctatagccatatagagtttcatgttttttcttcttttttttggtatgtttaacgtcccgaaggaccattacgtgaaaaaattgtagatcaatgttatcaagttatcagaacgcataaaaatgaaaagaaagaatatcgtatgataaatcatattcacaaaacatattaataagaaaatatccaagtaaaattattaaattaatatgaggtcaggtagaaaacatctaaactacaacacatcatgtaaatctataccacaagtaaattattagccagtatggagtaatgactattgataaaaagaatttaataaaataaatagaatacaatgaaagtagtgcttaatacatattaaaatctttagaaaatttatttaaaagtgagattaatgaaatatttaacacaacaaaagacttttgattttttctcaattaattatgttaattttttttatttaattaaagtagaatgacacatgtcatattcttgtgtgatgatgtgtcaatcatttgaagagagttgaccaactttcatatatatgattttagaaagttataacatagtgtattcagagttaaaaatgacataactatatcttgcatcgtcagaaactaatatctttattttttcattagtacctatgtataattatttcttataaaatttaaaaccccacttatttggttgataaattatttacttctacattttaagcaaaaacgcaaatcttgcaattatgcattatgcagcaaaaaaaggcttttattaacaaaattcatttgttcacgatatataacgtcattccacgggtgacaatcaaacccaatgcaaataaaaattcactaaacagaaaaattgcacctcatcgccaaagttattccacggtcctagtagttttctattcagagaaattgcgcctcatcgccaaagtaatcaaaaatttgtaagtcttttacctcttttatcaagatacaagatcgacaatagaaaaagaaaatttatataaagctaagacaatacaactggatttcagaaacttctttgatacttgtatatatgtaagccctctctttatagaagccgagagaaatacaaaaacccttttaacctaatggaatcttctgaaacaagtgaggcgtaaaagcaataaactctttgcctttgtgtgtacaaatttatttggtaattggttcactagagtcacatgtgacttcattcaaacaaagtgagtctaaataatattcaggtttgtcacacatagcctcaaactgctccttcttcatttcttcttgaaggaccgacaactcctccaaatgcttctgaatctttcggtctagttctctcatccgagtcgtgcggttcttcgctttcttcttagtaacacgaatctcctcaagcttccttttcaaccaatccaacttgaaaccggcagcttcaaggtccaaaattgtgttttctgcttcttttagttcggcttcgaagagagattgctgaggtaacatgtttatcatgtcaatgaggtctagtagggcagtcaagtaagtttccttggcaaattcactctttagacaaaattttgttgtcgtctctggatgtttctcaaagactcgtttcgctagacctaactataaacaaaagtaatcgaaaccatatattattttcattagagattacatataatcagaattgattgatatattacttacctttgatcggaaaatccaaaagccttttatgttcacgatttcatcattgtccaaatcctcatcatatgcagtaccatgatgagaaagtgttgatttactctctgatatcttcgacattgtcacgaccaaagcttcgatctaacctccacattgatttgttagctctttagagagattacatagtttaacataattgagaaaagcaattcctaatctctttaaataataaaaggaaacttaaattaattcctaaaactaaatagtaaataagattacttcctcatatccaactttctaaaactaattatttacgtgaaatcttcttcttatcttcaacttcatttttcttttctttcacatacacttacagatacaaagactcgtggctcctctctccagcccgctgataaggcagccaaaacataggtattacaatatttttcactcttccaaacaaaactgaattgaaggtacaatatgtaatgacaattttttaggcttatgtttttataaaagttcacattatttaactatgctttagggccaccaaaatctaaagattggtcatgctcctctctctccaatagctcttcgatctatacttcttttgggccaaggggttttattagtagttggtccattataactgttaaggtgtatttttaatgcttatcttggcatcgttttattctgagaaactagtggatgacgtgtccattagggagagtatttttgagaatgctgagttggatatcttaagaggcctcaagaaataagactatctctaatggttgtctctcgatgagttggaatgaaatagaggtacaaataaaatatatagataaaaatagagatgggttgtagatacttagtagattgaatgaaagcatttggtgagattgcaataatattattggtttcaacgtcgacactatattaccgtgactcttcatgtgtcacagcttgtttgtttagacacaaaacacattactttgtcgtcaaggaacatatatagtgcaattaaagaaacggtgaaatagtggcagcttacgaaaaaaatgatacgaccaatgaaataggcatagcctcaaagttaagctacatagagagcgctcaactacaaaacgtttccaaataaagagagttctcatttagaaaacaagacgcaagctgacaaagaagaaaaactaacagaacctaaatccaagtgccctagaactcgtaagtcatcagaaaacattgtcttcgttcaaagagagaggagctctagctgccaacaccttctccttatatatctgagcttcgttaaagatctgtttctccatttcttgcagccgtttcaaagaagcctcttccttcttcttcttttcctttatctcaccatgtttcttctccaaccaatccaacttaaaccctgcttctctcaaatatgtcagtgcagcgcctgcaccagatatatcatcattggagagatcttgaggcgattggcacagcgtcttggttaagcttaggagaacattcatgtacgccgtcttcatatatggtttctttggacgaaatttggatgcaatatctaggtgttttgcaaacaaacgattcaccgattctatctgcgagtggaaaggatgcataaagtaaaaccacatcatatctaaacctagtatatatttgaagaaactggactatatactaatagactaacgatttgttttcttcatattctttatatttaaaagtatttttcttatacttgtttcaaaacagaatacctagaatttccactacataacaacaagtgtggtataattatttatataatttcttacttgaggaagaacttgaaacccattgacatctatggtttccattactggtgaagatttctttgatacatctaattttcctacaacttcaagaacctctaccttggcaacaagggtgagttctccattcaccagaaatccctcattagtatgcagattagtgagaggaatcatagctggaaacccccggctagtagacttatgatcaaaccagtgttgtgattctgcaaaatcacaaaaaagtagtcatttcatcagtaagacataaaggtgccctcccatggagttaatattaacgttcatacacagaagcatgaaactaagttaaactattaagtaggaagcaaaaacaataacagtttagttgggagagttggtccgaaaattgatttactaaagttagagaaaacttttaagataaatgtttacaacataacataaaccataaaatagagcaagcatagagaacaataacctgttagtttggagagtttttctgatttttgatttactaaagtaagagaaaatttagtgtgtcttgtccatccaatagggaaagatttactattagcaacgtttaaatacagagccaaattattagccctataagccaaataagtcgccttttcatttcccttgggataggccttaagacgcctgcaagcaaaaaccaaagtaaaataatcagctaaacccatattctagggataacattagataacaatttattttcttaccatttgcaatcaccaaccacgaattgatcagagtgaattgatgcggattgcaaagaggagaaattttcaatcacccaagtaatagtcttactatcaacttgcttccccattgattttgataatgactcctactcaccaagactttcagaagaaaaaaaacaaaaatcaaataacaatatagagaaaccaaaccaatataagtattaagattccactgtgaatatacgaacatagtcaagagaataaaaaaaagggtagaactatcgaagtagtttaactacttacctccctgagtgaggtagagagaaagagaagagaggaagagacagagatgatgtagaggaatgtgaaacgcttcgtctcctcatatcgcatagggtttatatactaactagtttagtctaaaactaattttgcaagaagaacatttagttgttcctaaattatttttaagacagtgaccttaacaaaataacaaaaaagaccctagctggtaagtagtcatttagaacgtttattgccaaataatgaaacataacgttattgtttcttcattcccaagaacaagtgtcgttagatttctgaatatctttttgtctatcttttcttttgttccttagattttggctttttttcttcactagttctgataaaacgatgatctatttctcttttttaaaatctaatgttaaattatattaaaaaaaaatatcacttttacaacggcatgttattctattgactagtcactattgcattaggatacttttatagtttcaaactgaaaaaatgtttattttctactttacttgccgagcaagtattatatcttcaacacatttctgttgttttccattctcctttatctctctagtctttttctttttaccatcttagatttattatttattacaaattatgagaactgttatataaacgattttatcacggacaattcctttcaacccttattagatccacgacagacgacacttccttcttattttctacgcgcttgatggaaactttcaatatcttctctgcgtagaatcctggcgaacggccataattgtacatcattgtagatcttctgcacacttgcctccattaatctacaaatctgctaataaattgaattagctgggactcgaaccctatacctcttggtgtagaagcattaatgaaccctgggtcaaccattgggccaagggggcttctagtatctctctagtctattgaacaaaaattggagaagtcggtgaccgaaaagttaagtatggaaatagcactagcaaaaggccctaaaactaaaaagcacgatttttttttttattattaaaatatgttctttctatttctaaaaaaatgatttaaattttacacacaaactaaaaaataaataacttttctatttatttatttatttattactagtttaataatattaatctcacttttttctctttctattggtcataaataaaaataataatgatattattacaaaatatcagtctttgcgaaacatcaaactatgaataaagggagtatcgtttagtccatttgttctatcttcaccgtcttgctattttttgggttggatctttgaagatttaccaaaaatgatggcagcgatttacggtctttacataattaaaaaccctattctacaatatacgattatttttcttgttcccgatcttgcagctgcctagaagtttgtgacttttcatgtgagctgcataaaagtttgtgatttttcatgtcctgacaatgacaacctaatttagtgttaatttcgccttattcatcaattttttcagggaaagaccataaaacgaatttttggagtagactgtacaagcttctttttcacataaaccttcacatgcttcatcctttatcgaccagagtatcaaattcttagtctatatacttagaaatgcttgtaggtgttgattcaagaaatcacacaatgaaattgattaaagggaaaataaattaaatcaactcttttgttaatagattaatcaagggctcaattgcaatgaataataagattgctttgagacaaagttagggttctgatcaagaacaatgtagaaaattaggtttcttatattaaattgtggatccttgaatagaggacaaactcttctatttatacaatattcaggcggttaaaagataaactatacttccaatttttcagagtttgaatcttataattttccattcttttcataatttttctttatgtgaaaggaaaactttttttaacgaattaggaagtccgtcgggagatctccttacttattaacaagaaaacatagtattttccgaccaaatttcctaccaaaattaccaaaattttgaaggaaaaaacacttaccaaaatgcttccaatttcctacaaaatatatatttcgtaaacaattcgaaggaatttctcgtcaaaaatattcgtcaggttttcgaaggaattttctatcgattttcttacgacatatgatatcgtaggaaatctcataggaaaatggcaggaaaaccaaaggaaatatagtcgtaggaaagtggtcggaagcattaccttccaatttcctacgataatatttttaaaggagattcgtaggataagcgatgaactgttcctcctagtttcccacgaaaatatttttgttagagccgtaaggaaaaaagtaagagcctttcctaccaaaatgtttgtaggaaaatcgtagagattttttaaaaatgtgaaacaaaattttgacaagtaggtggaggataattaagtaggaaaaaaacatatttcgttttagtagatgaaataatatttatttcaaaattttgacaagtagttataatttcacttcagtcaagttgtttttaaactagatgcttcaatactaactatgctttgctttacattttcaggaagttcccatagtcaaagtaagacgctatgggtttggtagattgtttgctggcggatccttctcatctttcacagctccaggccaaacgattgcattacttcaagagcttcaaacaatcaagaagcgtgaacttgagaaggaccttcaaataaaatatcttatggaatgcaacaagctttttcttcaacatttttcataaattcaaccaccggattatccgacaattaagaaagagactacgaacaataggaacacaagtgtagatggcgatgatgacgacgacgagactcaagagtaaatcgctttcaatctctactttttatgtggcttgtaaaacgaattcatgaataaggatttgtaactttgtttgctttgtaagaataatttgtgagatataacaggtttcagtaagtgttcttatagatataaattatttattgcaataaaactaaaaaaaaattcagaatatttggtaggagaatagaaagaatgatatttcgtaacaagttagaattagtaggaaagtggtaaaaaaaaaaatggtaggaaattggagagaaatattggtaggtaaatggtaagggggtcttaccacttacctacgaaatttcctacgtggtttctacgagaattatttcgtaggacattccttatcgaatttcctacaaaaaaatgtttaatacgggacatttcctactaacatctttcgtagaaaattggtaggaaacgcttatttcctatgaaaatcctaccatttatgctgtaggattcttgtcgtgagtaaagcatatatagataacatatagataacaataaccttgtagtatagagagttattcagaaaaaattgttttactaaagttagagaaaatttagcgtgtcttctccatccaatagacaatccaatagacaaagattcaatatccggaacaagtagaaacagagaccaactattagccttattatatcctaatttatgttcttacccatttgcagccatctacgacgaatttatctgaataaatcgatgcggcttgcaaagaaaacgaatctcttatcacccacgtaatcgtcgtatcaacttttgtctccattaattgacctcaattatgacttctacatacaatgttttcattacaagttaccaaaataaattcgttaattaataaacaaaaccaaataaagattaagattccactatggaacatcattctaaaccgtattttctttacaaattaatgaccatgtaccacgtttgagaaactgaacatagtcaaggaaataaaaaaagttgaacgatgtaaagaatcaattaagccacaactttacctcagtgaggtcgaaagaaagagacagggacgatatactgaaagaattaagccacaactttaaaggcgtccaagcttagattaggaataaatctaagcttcaactaaaataatttggcaaaaatgatatttggtaaatatataaaaatttcagaatatttggtaggagaatagaaagaatgatatttcataacgagttagaattcgtaggaaattggtaaaaaaaaaaatggtagaaaattgaagagaaatattggtaaataaatggtaaggggatcccaccactttcctacgagattttctacgagaattattaactaatgtgcggtattttactaatgtgaggcattttacttcttctcgttggatcccaactctactcacgtactctaatcctttataaacatgtaatgaataacaatagtgtctcgcattagtaaaatgcctcacattagtaaaatgtcagccctttgttcattgtagtatttgttataatcaatcttttttagaaaattggtaaaacaaaatggtagaaaattggagagaaatattgataagtaaatgataatggggtcttaccactttcctacgagatttcctatgtggtttctacgagaattatttcgtagaacattctttacgaattgtttaccaaaaactgtttaatacaggacattccatactaatatttttcgtaaaaaattggtatgaaacgcttatttcctacaaaaaatcctaccattcatgatgtagaattcttgtcgtgagtaaagcatatatagataacaataaccttttagtatatagagtaagatttgacctagagtaagtctcaacgaaattttgcaagaaaagtatttgacttttcctaaattatttttaaaacattggcattcccaaaataacaaaaatgacccataacctagtcgttattgaaggacgtttatttgacctaatattgaaacataacgtttcattgtttcttcactctcaacaagtgtttttcattaatcctcaatttatcaaaggagaagaatgtgttgataggtcagcaccaaaattttaaagaaaaaatatagaaacatcctatatcaaaacgtttccacatcaaaagagagataaaacatcaaaaagcaagcaaagaacacataccaaaacctaaatctaagtgcccaagaactctcaagtcatcagacattattgtcaatgtcatcgtacaaagagagaggttctctagctgctaacaactcttctttctccttacttatctgatcttcaatgtctaagcacctcttcttaaatggctgaagctgttcgtccatttctctcagccggaccaaacaagactcttctttcttcttcttttcctttaattcatcaagtttcttctccaaccaatccaacttaagccctgtttctatcaaatatgccagtgcaacacctgcatcagagagaccatcattggagagttcttgaggcgattgacacagcgtttcggttaaactcaggaggagattcatgcacgcagtcttcaaatatggatttttaagacgaaattttgatacaatatctaggtttttttcaaacaaacgcttcacagaatctacctgcgtgtgaaaacgatatataaagtaaaaccacaatatataaagaaactgaataacacaatgagaaactatcaagttgttcaaaactgtatatcacatcttgtggttgaattttctacaaaccaacaaaaactgttgtatgtttccttagtttcttacctgtgaaggaagaacttgaaacccattgacatctatggttttcattattggtgaagattcctttgatacatctaatttccctacaacttcaagaacctctatcttagcaacaactttgagttctccatttaccagaaatcccattttggcgttaagttcggtgtgggtaatcattactggaaacccccaggtaaaagccttttgaacaaaccagtgctgagtcactgcaaaatcacaaaacatattgttaatatcaatgtttacaaattgacacagaaacataaaactaacatgaaccataaagtagctagcaagtatagaaaataataaccttttcgttgagagagtttttctgaaccttgatttactaaactaaaagaaactttagcgtgtcttcgccatccagtaggtaaagattcgttatcaggaacgtttagaaacagagaaaaactatcatgagctttgttaattcccttggggtaggccataatacgcctgcaaacaaaaaaaaaacaatcataaaagattatcctgtaggttaaattcatcttttttgaagaagagatctattccaacgtgtctgaaactcagcaccttaaactcggagatttactactgggccaacaacccgttggttaaaacaaataaaaacagtctatctacttgccacttgcagccaccaacaacgaatatgtcggaataaattggtgcagattgcaaagaagagaaatttttaatcacccaagtaatcgtcgtatcaactgttgtctccattgatctcaatgatgactcctacacacaaattttgtacatcgaaaagttaaagaacaatctcgagaaacaaaacaaaaacaaagattaatatttcgctatggaacacagaatttatttctctctttacacgttactacgtctgagaaactaaacatagtcaaggaaaaaaaaacttgtagaacgattaaaaattattttagtatttacttctcagagttttggtcgaaagacagacagggacgaagtactgaaacagtgcagccacaacttttaagctttcaagtttagattaggaataggaagactagggttaataagatttgacataaaagtctataagaaaatttgcaagaaaagcattggactttccctaaattatttttaagacaatgaccttcacaaaataataaaaatgaccctaatcattatataatattccctctgttccttaatacttgattttctagaaaaacacatatattaagaaaacatattataaattgattataaattgattactttttgtactttacattttttttataattttaaaccaatgatatttaattatttatcttgaagtctgatattaatcaataataatcaattaatattacatagaaaacctaaaaatatttatatgacataatattgaaacatcaaacataacgtttcattcttttttcattctctataacaatttttcactaatccacaatttattaaaggagaaggagagtaatgatagttctgcaccgcaatattatagaaaaatcctaaatcaagacattgtcacatcacgagagataaaacattaaaacacaagcaaaacataaatccaagtgcccaagaactcaaaaataatcagacaacattgtcatcgttcaaggagagaggagctcttgcagctagcaactctgccttcttcttatctatctgagcttccaggtctaagtacttcttcttcaatggcttaacatgttcgtccatgtcttgtatctcggccaaacaagcctcttctttctttttcttttcctttacttcattaagtttcttctccaaccaatccaactcaaaccctgcttctctcaaatatgccaatgcagcgcctgcatcagagagatcatcattggagagttcttgaggagattgacatatcgtttgggttaaactcaagaggacattcatgtacgccgtctttaggtatggattctttggacggaattttgatgcaatatctagatgtctttcaaataaagacttcgcatattctacctgccagtggaaaggagacataaaaattaaaccattgcataattaaatcttgtacatatataaagaaactgagcaaaaaatgagaaactcttaaattatgattttgttttcttattcttgtttcaaaacgcaaaatgtaaaacaataaaaaagtgttttccttaaatatatttttttttacctgtgaaggaagaacttgaaatccattgacatctatggtttcaattactggtgaagattcctctgatacatctaattttcctacaacttcaagaacctctaccttggcaacaacggtgagttctccgttcctcagaagtccctcttccgcatgaagttcagtgaggctgatcatttctgtaaacccccagtcaggagcattcttatcaaaccactgctgagtctctgcagaatcacaaaacatattttatctctgaacaaaaccagaaaatatgacatgaggtatactcttagcaagcatagagaccaataacctttaagtttggagagtttttccgaaattttatttactaaagtaaaagaaaattttgtgtggcttcttcatccaataggtaaagattctttatcaggaacgtcgagatacagagaaagataatcagccttattatatcccttggggaaggcctgacaacgcctgcaagcaaaaacaaaagaaagcaatcaaagaatattatctgtaaaccgtagattagacgaaaaatattagaaaacaatttatcttcttaccatctgcagccaccaacaacgaatatatcagaatatattgttgcagattgcagagaagagaaatttttaatcacccaagtaatctccttctcaactttattttccattgatcacgatgatgactccaacacacaagttttttaactcgaaaaagtctaagaacaatcttgataaacaaaagcaaacacaaactgaagtttagccacaactttaaagatttgaatacttagatcaaatataaaagcactccttttattagctttgaaaataactcaaaacaaagctttcaatctctctctcaaatctcttaaggtttaccacaactttggcaactcttatataggagagggatgataacaaacacaatagaataagatgtagataactcctaacatatctttagattactcctaaagatttatcttaatcctattttaaaacataacttttattccctaatttattgacttcatgcttatcccaacaaactcccctttaagcttgaagtcatcttccaacacacactgaactcctactagttctctcatctctctgaacttaatccttccaagtggcttggttagaatgtcagctctttgctcaactccgggaacatgatccacttcgactaagttattctcaacacattctcttatgaaatgataccttcgatgaatatgtttactcctaccatgaaagacaagattcttagtaagagcaatcgccgacttgttatccactcgaatcatcaccttctcacttgttgtcccacacacttctgcgaataggtcttgtaaccatatggcttgcttggctgcttcagtagctgccatgaactccgcttcacaagatgaaagagccactacttgttgtttttgtgaacaccatgtaatgggacattgatgaagatagaagatatgaccggcagtgctttttccatcatccaaatccgcactatgactactatcactatagcctactaatccgctcttgaatcctctcttgaggtacagaccatgagacatagttcctttgagataccttagaacttgcttcagtgcgtttccatgtgattccctcggttgttgtagatacctgcttagtacaccaacgcaataagagagatccggccgagtatgcactatgtatctcagacatccaatcattcttctgtagtctctttcggtgatgcacttctcttcttgtgctttgcagagctctaatcctgctgccattggtattaagaccgggttgcagttactcattccagcttcttctataattttcattgcatacctctcttgtcttaatatgatgccattctttctatggagaacttcaatgccaaggtagtacgtgagctgtcccagatcactcatttcgaattttccagccatatctttcttgaaacagagtattagatccaagctagagcctgtcacaagtaaatcatcaacataaatagccacaatgagaagcttcttttcttcttgtcttctgtacactgatggttctttagaacactttacaaaattcagttcttgaagaattttgttcagcttagtgttccaagcacgaggtgcttgttttaaaccataaagagccttgtgtaatttgtagactttcccttcattgtctttatttgtgaagccctcaggttgtgtaacataaacatcttctcttagttccccatggagaaaagcggtcttgacgtctaagtgatgtacttcccatccgtttgatgctgctaaggcaatgatgactcgaattgtttcaatacgagctacatgagcaaatacttcatcgtagtcaataccatgcctctgaacataaccctttgctactaaccttgccttgtacttgtttatgctgccatctgaatttcgcttgatcttaaaaacccattttaaccctatgacttttcttctaactggaagatcaattaagctccaagttttgttcttctctattgacaggatctcttctttgcaagcatctctccattctttcaacttgtttgcttctttaaaatcccatggttcatcattaattgccaatagaacttgttcgccttcgatctctgccattaagacataatcgtccaaataatttggttttccaacttgtcttgttgatcttcttaatgttggcagaggagtagcatgtgagggttgtgtttcttcagcatcaatctgttcttgttcattgtgttcgttttctccttcttcttcgtgactgttctcactttcttctccgtttttttctgtttctatatcatcactttcttgaattccattgtttccaaattctcctaaggtaagtgagaatgttccagagatgtcccgagtttcagaatctgaattgttccacttctagctcatgttttcatcaaagtacacatctctgcttacgataattttgcggttagttggatcaagaagacgatatgctttggagcctggttcagttccaagataaacaagcatctttgacctatcatcaagctttctcaaatgtggaccttcaatcttggcataaccaatacatccaaatacacgtaagtgttctacattcggctttctttgcttaaaaacttcatatggtgtttggttctgcaaagatcttgttcctactctgttgatgatataggttgagtgccttactgcttctccccacaaatagttaggcattttcatgtgcttcaagatgcttcttgtcatacctagcaacgttctatttctcctttcaacaactccattctgctgtggtgtgtatggagcggttaagtgtctgttgatgccttcttttgcacagaaatcttgaaattcttgagagacaaactctcctcctttatctgttctgaaggttttgatcttaactccactttcttgttcaactttagtcttgaaatctctgaatttttcaaatgcctcactcttctccttcaatagcatagaccacatgtaacgagtgtgatcatcgatcagcacgagtatgtatcttttcttagcagttgtagattgtgttatcggaccacaaagatcaccatgaacaagttccaatacttgtgatgctcgataagtagttgctttagggaatggctgccttgcttgttttccaaggaggcatgaaccacacgtctctttctcctttggaatattagagattccgataaccaattcctttcttaccatagcttggattgtgtcaaagttaatgtccaagacgtgcgtgccatttagttgactcacttgctgcttcgagttgtaagcacttcacgttttcaacatttaaatcgactttgtaaagtctgtttctggagcgtgttgctcttagtaacagacacccttcacgatcatgcaacgttaattgatcatccttcattctaacatcacagcctgcttcagtggcttgtcccaaactaatgatattgctttttagatccggtataaagtagacatcagtcaatgtcttgcgtattcctcctttggtgatgagcacaattgaacctttcccttttatgtcaatacgagaatcatcaccgaatctcacctttcctgtgatcatctcattcaacttggagaaccactgaagattacctgtcatatggttactcgcaccattatccaaataccagctattatctgagcaagcttcaaactcctttggcttcacgcttctctcattcaaataaaccacctcatgcatcataagcgactcaatttcatcatcatcttcattgttttgttgttgttcttgcgctttaataagtttgagcaaacgatctagacattcagatgcataatgtcctgttttatcacatctataacagatgactttactcttgtccctttgttgataaccatatcctccacgtcctctgccagaagaacgacctcgacctctacctcttcctcctcttgtatcataagatgattctgaatttgcatacatgagtttaccctgttcctccggtgaatcatcctcatcacaaacccgatcttcatatgttttcatccttcctactatatcttcaaatccggttgtgttgagatcgagaatctgctctaatgctgcaatgatatgtatatacttctttcgtggcaagcttttcagaaattttttcacaatctttgactcttctatttcttctccaagagattctgatttcgtagaaatctcagatattctccctacaaactcatcgattgtctcattatctttcatatttagtctatcaaactctgccataagagtttgtagctttgcttcttttaccctttcagcaccgaggttccttgtcttgatggcttcccacatggctttagaggtcttgtgttttccgacttgtaagatagttgattcgggtacggattgaaataaaagagctcgagccatatcattcttctccatgtcatctgatccaggatcgattgtttcccaaactttatgcactcggagagtagcctccatcctcatagtccacaccgtgtaattagcgttgttcagcatgggacaatgaatggatgatgacccccccccccccttctttaggtttgttgcttgcagcaacaatttcactcatattcgaaaaagaaaaattgaaacctaggttatgctctgataccaaataaagatttgaatacttagatcaaatataaaagcactccttttattagctttgaaaataactcaaaacaaagctttcaatctctctctcaaatctcttaaggtttaccacaactttggcaactcttatataggagagggatgataacaaacacaatagaataagatgtagataactcctaacatatctttagattactcctaaagatttatcttaatcctattttaaaacataacttttattccctaatttattgacttcatgcttatcccaacaaactcccctttaggcatccaagtttggattaggaggactaggggaatgcaaaacgtttcggctcctcatatctcatagggttaataacacttgactttttagggaataacatttgattttcccgaaacaattttgtcaaaagtgaccctagtcattttttttttatttttttattttcgtcaaaagaccctagtcagtaacaatttaaaaccatttatttaacctaaaaatggaacacaacgactatatggttcaatataaaccttttgtcaccattgatcccaatctacacacaagatttgtcaatcgaaaactcaaagaacaatctcgagagacgagcaaaaaaacaaaattccaatatagaacattattgttaacagctttatttattgtaggttaccatgtttgagaaactgaacacagtcaagaaaataaaaaagtagaacgattaaaaatattttgttaagttttaagtatttacctctctgagtgaggtggaaagaaagagacaggaatgaactgaaaaagttaagctacaactttaaaggcttccaagtttggattaggaagactagagaaagctctagagaaatgcaaaacgcttcggtgactcatatagtcatatcccgtagggttaataaaattgattttaagtctaaactaataaacaacttagggaagaatatttgatttctcaattatttttaaaagacgttaaaacaaaaaaaagactctaaaaacatatatctagatcatagatataatcagtaaaaatcaaggtatatcacatctacgaataaaaataaaccaatatgacattttgctgacatccttgataatatattcaatatctattttagaggggtatatattagaacaaaatcaactatattttattaaaaaatagagttgtctctaaaataaagaaaaaaataaatagaggtgaacattggagatgatctaagactataactggagatacaatgttttatttcgtaatagtgaaaagccttttaaccccaaatgtccttcgtttttagagagacatactaatatactatacatagtacttttgtccctgagaattataaaatgcatcgcattaggtgaaatatctttcgaggtttggtgcgaagataatgttctttcagcatgtaaaagaaagtatgttttattaacaacaatataataggaccagtacttgagacttgtacgtagttgttgttgggaggcattaaatgccaagagacaaaaggcggtgaaactctctaaacctccaaagaatatctaaaagcaaaaccctacacaatgagtttctatacctttgagtagaaccgtcaaatggtcatctgaccatgggctaagcccagtccacaacattatggacagtccatggtcggcccgtaaagaaaacgggttaaatggtctaaagaccaattatgtccacgggtttaatgggctagcccacacggtctatggttggcccatcaagtttctcaacacatcaattttcttctcttctcttctctctccctcggcgacgaagctccctctctctctttctcgcttcgacctctctctcaactcctactccggttagttctactagaatatgaatctgttgattagcaaataatattcagacattttttaattcccaaatctaagcttaactcttttgatgaacttattttctatgtatctcctcaagtttgtcactttatgacttattttttacagttttaagtaccatctaatcatatttgtaagaggaagctaagttcttatcttttcttatgaaaatgcattgtattcaagcaacattaagttatgggctgaccatgggctgaccattggacatggtccttaatggtcttggacaaattttcagaccattgtccaataaggaccatccattaaaacccattaaaactaatggtccaattggacatgaccattgggctttggacaacccaattgacacttctagctttgagcgctatagatcttgtaagagattctttataatactacgtactttatatttagtgaactttgtaactattgtgcatgtcaaaattcgatagagtctctaactatctagtaatcttttcttttaagaaaaagcattttccttgcccagcctgtttaaatcttcttcttttttgtacatcttttatctttccttaggccagtactaaaaaagaattaatagggtcacataaaaccaaaagagaataacttcaactagaaacaactttattatgcaaacatcgcaaataacaacttaaataaacacaaaggcattacattatgaaactttattccgatagtttctcctcttaaacttaaggcacttcattacaaacgtaagtgtattgtcatatcacatacacacgtaagtgtatatataaatgaaatcgtacactcatggtggttgatatattatgtagatttagtgaccagactgagtctgaaccgcttctccggcatatgaacaacaccttgagcagccatggtaacctttgtagcagcagccgtggcggcagtaacttccccctcctccttgtcgcccaccgcctccttggtatcgtcctcctcctccttggtatcctccccctccgtggccaccatggccgcctcctccttggtatcttcctcctccattgtcaccgaatccaccaccatgttgttcaggtttcacagtttcctcactctctgacttcaccgtgcctgtccaaaacaccacagtatatcaaagatatactttagctcttgcaattgtgcactacttaatatctatttaaaaataaatttctattaaatttcagatctgtaaattctttttaaataagttaaaacgttagatataagatacatataaaatttgtgcaaaccataaataatggagattgtttgatatatacgagtaacacggattcatgttttgacttaagtgtcttttcttacgagtcttttgacttagcaagtcctaataattgaccatggttcaaaccaactttctagatttaaaactgttgagagatcaaccgaaaatgaattaagatcgctaagaccaagattacgagattgagaattatttatgggaatatatcatccatattattagaaaaagaaacgtaattactttcactgctaaacatatatacaagtttctatttgtatttgttttagtttgagatatatatgtatatttccacttctgtataagtgaatatattttgtaactactattgacgaaatagtttgaaaatatctaatatcggtacgttagtttaggtttaattagccttggatgtatgaagtagactgaaatatatataacacgtacccgcggcagccatttctgagacgatgaaaagaaatgcaaagagacccaaaagaagcaaagtcttggaagccattttcttacaaatactgcttaaaacttgtgatgaataatatgtccccatgcatgctctctatttataatgaaaatgaggacgagggaatgagaaaagtcaaataaactaatccacagtcgaaagaattttagtaataaaagaaaatgttaaaagggaagtaatgtatcacaatatagaaaaaaacaaagtggtaaggagataagtatcaaagtatgtatacggtgtcgggtcccgtatgggtggtcgttggatttactgtgaataagtttgaaacaccataaatagcacaaaccccacaagtgttttagatcttttcttatctacgtcatcacacacgtatagcgatctattattggatgatcaagtaattatatattctttaattgtagtaattttctcttctttattatttggacgtagtctatccttttctaggtttagagaggtcaattgtcttcataatgggagatagtagatggtatctttgggttggctaagtgcaccattgataaatctcttttgcaggagattcaggagaagatgtttcatttttttttttttttttttttttttttttttagaagatgtttcttaggtttcaagactatttgtttctcttgaatgattgtcctctttcgattttggtttgatatttcttgctttgtatttctagttatatttttagttcatttctttaggactttagttttcgaagaaatttcttttttcgttggctttgtttctgcggacattttcgtcatccgtcggtttttccctcgtttgagagtttgtatttcaccatacttcctcaacaagtttctctaatataattcagttgacaaaaaaaaatcgtctgtttattatcttttaaagattttgtcaaaaatcgcaagcgatagattttaaacagctggataaagacaaaactatatgcactgaaagtagatcatagaggagctatacaaagtagctactaaggactaattaaatttttaagaacttggaaaattgcttggctacagttaacacaaggtggttgtgatcaaagtaccttaagaccactctctcaaataagagatcgtcattagtatttaagggtcgaatctcacaaatcttttttgttcacacgtaaagttaaaatctagaaatgaaactaaatcaagtaattatataaaaaaaaaagtaattgtatatcaaaagacaaaagcatattaaattgatgtaagattcagatgtttaaaacgtcggatttcagaaattctcaggaaatagacaaataatagttctagcagttaattaggattgttattgcactattctagaactacaaacctcaattctataatcaatcaactcttgttgcatggactaagtatgcttaattgtattgaccccactttatatgtagatccctagaactaagcaaacattataatccggtttgataagttcagctaagtatctaaatcagacctatcctcatttagctaattaagcccatctagttccggcaataagatgcctctcgaatcttacctattaacttaggatcaagttctagttaggtactctagaactagcattaaaaacaatcaaagataaagaactataaatataaatcttaacaggttatcgatatactaattcatctaaatccctaatgaaaaacactaaacccagctaggggattactcaaacatgatcatcgaaacataaaacatgtttgtataagattgcatataagaaatcaaaagaagaatagagtttaggaaaagatcttttctctacaaggttttgaaatctctcaagaactctccaaaaatctccttgaattgtagggcaaaagtagaagacctaaaaataaagctttggtctaaacaatgaccttttaaaatatattatatgttctcaaaaacgtgcagggactaattctgtaaatagaaaaatctttaggtgtaaattctgggatcttcaaatctttaaaccgttagactcttgttgcgccacaaaccgtgtcgatcaacaccatggaagtgtcggtatgatgcctttgtcagactccaaattcgtcttttagcttaactccttccgtttttctccaaaatgctttattagtttcaatccaatcccggtcatagaaatagctgaaaagactctaaaaagactctagaaataacaaaaagactctaatacctatacctagatcgtagctgacagcagtgaaaattgaggtactgtatatcaactcttcagacttagcttttccttggccaaaacacaaaaatcgaattcgtggaagaagttcaaaaacgcaggaactcccaatttctctagccgattaccttgatcattcaaaccaaattcatatgcttaacagttctaattaaatcataactaccatgtaattattcgcatgcattcacatcatcctaaattttaaaccaaattctacaactatatctaataggctttcattgctaggactcatcaataaagttaatattcaagaactttttagactcattcccatacaaaaccatgttaagtcgaccattttcatagttttggtattctttttctccccaacaattattctttttacggatttagacaaagtagtactctcatcattggaaagatatcctcagcattcttccaacctttgtataatcattccttcttaagtaaaatacttggttcatcggacattattctcacccttttactctaaagaaaatcatttcattcagtttttataaggaagaaaaataccattatctttttcactatggcctcattatcaggtatgaacaaggagtcaacctctacaaatactaaccttactgaagaggtaaaaggaaaagcagaaaaattagctccagccttaatggattatgttggaaacgtggatgtcctctagtctatatcggtttgccatccggatatcacattagtctaggaattgactctgcagcattagtaacttaggcaatagacttgagcaaaagatcattattcccaacaattttttgactcaataaaacgttctttttaaaactcaaaaaaaaacattattagtaaccgcctccctcaaaattaaacaacaatgtccccaatcgcattcaaaactgaaattagcagaaaaaaataaacgaaaatgaaaatgaaaataaaataaattatatatatgaaagttggccaacactctccatatgagtgacacatcatcacagaagaaaatgacatgtgtcattctacattagttaaattaacaaactagcaaaaataattgagaaaaaaatcaaaagttttttgttgtgttaaattctctattaatctcactcttaaatgaattttctaaaaataatcaataaataaaaaaatcataataatgtaccaagcactactttcattcttttctacttcttttattaatttttttttatcaatagtcattaacccataatgactaaaattttacttgtgttgcagtttagatgtttgctacctaacctcatattaatttagtaattttagttggatatttttttttattattacgttttgtgaatttgatttatcatatgaccttttttatgtacatttcacgtaatagtcatccaaaacattagacataccaaaaaaacaacaacataagactctatatgactatatggtagggatgagaattacactgttgacttaaattactagcatatcatgatgtgattgtgtactagatgacgagagaatatatggaataaagaattgtttgttacaattaagttagccaagtttcaaaacacataagtaatataactacatacattgtatcggtatatcatatattgttgtagtatgtgatcatgatagtgaaatattagaataataaatatataaatatacatattatagtagaattgatatttcgagttatacatgaatctaattataaaaaataataattatattaaatagatgaatttatcaaaattaacatcaaaatcaataaaaaaccataatcatatttttccgacaattttaaaaacaaaaacccatgcgtagcatgggtgttcatctagtatcttataaaaggcttttaaacatctcataaaacgtattacttatacaataaaagcttataaaatacaaacatcttataaaaagcttttaaacatttgataaaaggtttataaacttcttataaaagcttataaacatcttataaacatatcataaacatctgagcattccaataaatgatatactgtatgtatcaaattggagcgtatatgagaaatcaaacatctgataaaacgtattacaatgaaagcttatcaaatttgtaatatttttttaacagaatcttgtaaaagcttataaagtcttaaaaatattttgttaaaaaagcttttttattaacacgatataataacttacacagcggtaactctggagaagacggagatagcgatgaaaatagaaaaataatcgtccctccgttcctaattaatctaatttatacacttttcacacatattaaaagaacacatcaaaaatccattaaaaatgttttggtttttgtaatttacaattttcaataattctaaaccaatcatattcaattgttctttttgaaaactacaatttatcaataattaagagtgcattgaaaacttaaaaattgtatcgttttgaaacaaatttttttctagaaattggattaataaggaacagaacaaagataacaatcaaacaaagaaaaatagcaaagatacgtttttaatcgtccgatacgtttttaagtctgttcgtttaatgtttaattgtaatttgttcttgcccatttgggctttaatgaaattaaagtttgttgggacaaaaaaacttttttcggaaacagacatcattcttgaatttcgccccaatactgctctttctcttttccaagcagaaaaagggaattcgctgctcttctctcctctggttctaagcgacgctcatcattcacctgtatcaaacataaacaaggtatgtctcttaattctcccatatcatctcatctcatatctttgtgttcatttgcttgctgttttgtgcttatgtagttgtttcagatgttctgatgctatgatgttaatcgtattctcattttcatgatttagctgaaaaatgagaagttcatttgatttgctttctgttctgtgcttatgcagattattgattaaccaattaagcgacgctcatcattcacctatatctgacataaacaaggtatgtctcttaattctcccatctcatctcatatctttgtgttcatttgcttgatgttctgtgcttatacagttgtttcagatgttctgatgctatgatgtgaatcgtattctcattttcatgattcaggagaatggagtcagagggaaacatgaagaacttggttgtgtcacaagtaaccataagtgggtttggggagtcaactaaaacaaaagaacttacagattatcttgaaaacaaagtaggactactcgtttggcgatgcagattaaaaacttcttggactcctcatgggtcttatcctaattttgagatcatagacacttcaaacatccccaaatttgattgttacgagagagtggtgcctcatgcatttgtccattgcgatgcccataaatctttaatggatgctgcagagcaatccaaactcatcctcggtggccagccattaaaattcagcttgtcgtctgagaacccatatacacttaacccatataagttgactggtgtttcgcttgagattgggacggtttcgcaggatgacttttttttgtttctcatataagttggagttattggtgagagacatacaaacagtcaagcagtatagaacttttgttggttttgtgcttgttttgcagcttgcctcatcaccccgtgtctggtacagaacagctgatgatgatatctacgaaacttcggctgtcgatctcttggatgataatgacccttggatccgcaccactgattttacacaatctggggcaattcgtcgatgccttgggtatcgagtgttcatatctcctcgggatcacaataaatggacaaaagtcttagattatctaaagacacaaagggtgaacacggagcatgtgaggtggcggacctacgttcaaagtagaggtgcaacttaccccggttaaatttaaaaacctttctttaatagatcatttgcctaagggggtgaactttttttccgggattacatgtgtctatgatgtttttgggtgaacacatgtgtggttttaggtatgtttttttacatgttctaacatgttctcgggcaggttgatggttctttttggtatgtttttgaggaaacacttatgacttttcaacttcaagtgttttccacagaaagatgtgatggacttttggtattgaatataaagatagctatcatgaatgagaaatcctttgttgataaggctctttgtattttttttttggttatgcttctagaaaaaatgtctttcttacatatcttacatagcttcttagtcaaacatagaaaagaacaaatatatatacatgccaaagttttgttagtgatcaagtctttatacgctttacaaacctttataagtttttataaggctttctaacctttatgactttgtaaagttttataaggccgacgttgttggcatcattctctaatctgagagatgctcgacaattttaccttgtgttcggtttttcctattttaaaaatcttatggtctgtttgctcatgttaaggttttatatatagagttgtgacaaatgtaagttttaataacttaattataccagccttcttatattttttttattacaagccaggatcatccagttataacgtaaagctggtaccgttcacaacttcttttatcagatgtgtctgccattgtaattattggatttgtgaaggacgcaaaacatcatgttgatgttcaaggctttaatgtctaccacaaaaatcggctctccatactaggcttttgattttcaagagaaatagtggattacacgaaatccttgttctaatttattaacaagccttgggttacacgaaatcccttctaggatacgacaatcaaagtactctctcttgttctaggcaaagatacaagacaaacaaatagactttctagtgtttgtttttgtgtttcaccaaagaatatctcaatcctttggtcttgtgaatctctgttttttctctctgtttttttctcttctatgcctttttgatgcaaagagacagagttatataatggccaacgatctccacgtacgtttgcaaccgtacgtttagtcataactgtaattccaacagttgccttggtttataagtaaccattgacgaacagttttctcggttaatatgataaccattggttcacttaaatcaccgaaattgggattgatctctcttcgggatcgtatcactctgttttcttttctcttccaattctattttatttttctttatcacatcaaaccaaaaggacatgagttctccggtgatgaatcaagacatgatccaagaagttctttcttatctcccggcttcaaaaaatggaaaattcaggctcctgaataaagagtgcaacaagagaagctacgagtcatggtttctcaatctcaatttctatagaaccaactatatctccggatacttcctagaaagctacaaaggaggatacacaattgataccagttttgtccatgagaggagagatttggaaaacaaaggagtctccatcgattttctgccacagggagagagaaagatcaaagcttgtgatgcaagtcatgggatattgctttgtgttaatgatacaggactaatacctgaatacatagtctgcaaaccaaccacaaaacagtatcatatcataccaaccccaaaattgtgtagccgtgataagtcactcggtataacggtaactggattggagcctttccggtataaagtattcaggctttttaacacgccgatatgaatcctttcagtacttttgcgtgagaagtttttgattccgattcgtttatgtggaagaggttaaaaaatctgcgtctaccaagaacagaccgtttaattctttcaaacctggtacaagcttcggggttcttgcattggagatcatggaacaacaaggtgatccgattctgtctcaaaaccgaaacttggtctttcgtacgtatccccaactttggtagtttcccagagttggtcagatacgaagggaagctaggtgttattcttcactggataaacaaagatcaagaagatgttcacggattatgggttttaaagagcagttgtggaaaggcgtggataaaagtgaaagatattaaaagcattggattaggtcagattgtgtggactccaagcaacgacgacgtaatgctttctagttgggatcgtttttgtctttacaacctaaacacagagacgttgaacttagtgcatacaaggaaggattttgcctcttacgtttgtttcccgttttgttctgattacgagaaagttgatctggacgaaagaagaaatggaccgacaaatgaaaactagtcaacaaggttataggaacatttaattttgttatatggtttgtgcttcttaaaagcttatgtatgaaaaaccattcattgttttatacttttatgaatatcttctttttttatcactgtactgaacttacaactctgctaaggttacaagtgaaacttttttttttttttttgataagaatgtaaatatcatttcgagaaatgaaaggttcaggaattacaaagtaaatcctaaaaacatggttccatgccaaaaaaagttaaaaaacatggaagcatacacattcgaggatccattcatcactaaatccttaagcggtgaagctttaggcaaggctatgaacttaactcgatagaaaagacttccctaagcaaaacatggctagaaacaatagcaataagggaaagagagatcttcagactgactaaaaagcgtagcggaagtcccttcaacgtaagcccaaacctaaaaaggggcggagcaacagaagctaaaggtggcaagcaatgctatcctctaccgacatccccaatcagtagcatggacaaagcaacttcttatcctccaaaagtcatactaacaccaccaaaacacaatgaaacaatcccagaaaacctcgaccaaattgaagcttcaaaagccataaaatcatttacttagctgatgaaagaagagcaacagcttcggtggaagtaaaccaaggcagcaaagaacccaaacatcgagtagtatagcaaacaagttcgacgtaactggagatgcatggacatgccatcgaatctgcaacgcaaggcagcccaaacctgcaacacgcagagacagctactccttccagccgaaactcacaagaaaccaacacgcacaataggtctcagacaaaatcaagtcaacagctcacttgcctcactttgacttgggagatggcatgaatagcgaggttacttggcgaaccaaggaagcaagagaagtcggctcttgaaagaaggccacacaaacaacaacattctccaagtcggcatagtacaagtcggcatagtacaagtttgtcgactacaaatctgcttacaagaagtttgcttttgcctttatgaactacttcagactacaactctgctaaggttacaagtcaaaagcaaaattcttgtaagcagatttgtagtcgacaaactcatactatgctgacttgtaaccttagcaaagttgtagtctgatatattgttcacggcagacttatacagaagtctgtcaatacaagtctgcaaaagcctacttcataagtctgttggattagtgcgtttcacaagtctgctgcagaagtatggctgagatagactcaatactgccgccctttacctccagactggcccctccataacgaacatgcaacacttcttcttccctctaggctctctcatacatcatgctaaggtaatcaattgattcatacttcttccctcaagtctgcacaagcctgcttcataagtctgttggattagtgcgcttcacaagtctgctgcggaagtatggctgagatagactcaatactgacaccatttacctccagactggccactccataacgaacatgcaacacttctcacagatttagttttagttacgacagatatatatgatttgacatattatttttcccgcgacagatttgttttctgtagactccacagactttctaacaattacagtagaaactctataaattaataatgttaggactatgaaattttattaatttatagtgatattaatttatcctataaattaatatttattaatttatcgtataaattaatatttattaatttataaaaatatttacgtaaaatacaatactatattttttaaaaaatgtttgttaatttaattttctatatgctttgttgtttgcatatataattatgtcagatttttgtttttctttgacttctttaatttatttttcggcaagatattgtgtcggtatatctacgacattaacgtgaacgtaaacacaaacatgaagcttaatctaatttctctttacacaaatcttagcaatgctttctcaaataaaagattttacaaaatcaactatgacggatcaaatacgcaaatagttatgtgactacaacatagatcataccagttgtattttaaaaagagttgtaattgtagcttgaacaaaaatttcatataaaaattagtcttaaaatatatacttaagatttatgattattaatttataatattattgggactataattttacataggaatttcaaaaaaattattatcttatcgattttggttaatttttacttggcccgacttgggaccgacaaaatttattaatttatcgtgtttattaatttatcgagtattaatttatagagtttctactgtattaaatttgaaggtacacgaacaagtcagtcatagatttgattaggaaaaatcaagtctgtggcagatttgcttagaaaaatcccaaagttattttgttttggtaacagatttattattttacaatttaaactgtcgtgttgccacaattgtttcatccaaataaaatgaaattcaatgatgacagattttacctttctcttttttgaagtaattagaatttatgaaaaaaaaattagataaagaaatgctagtaattaggaatattaatttattgataataattaatgctaatggcattctttgtaaataagttccaactctatgatttatttcacaaaatggctgcaaaaatgtatatgtagatatataaaataacatatattacaagccattaatatttattaggtatttacaaggcattttaaaaagttttaatgcggttttataagccatttacaagccatttataagaaggcttttcaatccagtgtcttcaatccagtaccctcgactgtcctgagcattccagtaaatgatatatgtattaaattgtagcgtatatgagaaatcaaacttctgataaaacatattacagtacaatgaaagcttatcaaatttctaatttttttttataacagaatcttataaaatcttataatttttttgttaaaaaagttattatagttttaaaatataacttaaattttcttataaaagcttatctaagaagaagcttataaagcttatactgaacccttctgacgaactgacgatgcgttaagcgttagaaaagcttagaaacccttccgaagaagcgttataaaagcttataaagctaatactgaacccttcagaagaaacgttataaaagcttataaagctaatactgaaccctttagaagaaacgttgtaaaagcttataatttttcagaagaagcgtaataaaagcttatactgaaccctttagaagaagcttacaaacatcttataaaagcgcttataaacatcttataaaaagcttttataatatttttataagatgtttaaaagcttgtatgagccatttataagaagtttctaagcttttgtaatattaattgttatggctcagaaataccatccgaattagtgactcaccttggctcactatgtgcattggagaactttgaggatcaaatccatatatcctacagatatcttgcttagcctccaaaaccacatctaagctatgctcagtcatctcaagaataagctcctcaagaattgcatctaagtaatttgttacctcctccttgttctcagcctccctatacacaacatttaagctttcgcaattgagcggttttggaaaacaaacacaatatgtggaaaaacaaacacaaaatatgttttttaactaccactagatagtaagaaatccattgttatcaagaatcattttgctcaccatctagtctttcataattttaaagtgtgtataactgaaaggaataatttataccttgaacgaaaataattgaattctaacatgtcgatttagtaggaagattttttttaccttccatatgtgtcaggtatgacattctctggaaaagagaaaccggttggaaaggagttagagttagacccaaacgaggtggtggcgcagaaatcgtcctcagtctccacagaggaaacctccggagtgtccccgagagcttgagctctccatgccggagagagaatccacgatggagagggggtccccacggccaaacttcagacgaactgacaaagcgttaagcgttataaaagcttataaaccctttagaagaagcgttataaaagcttataaagcttcagaaggagatcatgttaccagatttctcatagccttatatgactttgataatgccatagagatcaatgcacccatcagacactcaaaattgattggtagatgtaaaaggaaattgcatgtttaaggtatacaacagcttttgttggaagaaacgttaatatctccaccagcaattcatcaggcaagtcactgatttaggaatttggatacgaagttataaattatattatgtaaattaatatattgataaaactaatgaaagactccatagaattcgtttcttaactgaataaagatctgaataaaaacgtaacaagaacataagaaaactaaactattgaagaaggttgatttgtattttcttttccttttggcttcgtttccttcaaaatcgaggctatcaagcggtatttttgtttcttgttcccctgcatttttctggtgcgagaagatggagtaaatataacctttgttttaattttccttcacttctaagtattccgtctcttcctcttttaagaagaggtcgaggatagcttctttcctgctagttatttatatttagtttcctaatatcctagaatatatgttacaaaaccaaattcatttgcattattgagaatgacaaaccgtttcattcgctccctcctcatcatttatatataaggggccattatgggaatgaatttcatctgatggaccttgatcatcaacctatccagattcaccatttatataagtttaatatataaacctttggagataaaaagataaaactttaaacacaacaaataccggatctttggtgctggcctctactctacctttgcctgagatagactggaaataggagcctgaattcatctatcaaaacaaaacaaaaaattataaaaaaaacctttatccattggtctagattcgttaaatccatacacacaaaacaatatatagacatatggagataaaaagataaaactttaaacacaacaaatacctgatcactattgctggcctctactctacatgagatagactggtcttcagccagtaaagtgttacgtatgaggcccaacacccacctattctacagcaatataaaagaaggcccaagacccaacagcagaaagagtaagaagaaggaaccaaaggaagactctagaacttaaggtgaactttactagagttaaggtttaatcatagttattagctgtcacattctcattgcttatcactgtaacggtgctctgtgagatgatgagggcagatagtactatataagaaaataggaagagagagatagggtttatcttgtatttgagtgaaaacaaggtgtaagggggagggaagagactctaggcaaatctcttaaaacctgtatctttcttttatcaataaaatttcttccatttacattgcttttgctatagtttgtgttctaaaacgtatcataaagttggcgaaggggcatcgagattcatctatcaaacaaaacaaataatcataaacacaattcaagaaaaaccacagataaatcccaattgacttactcaccatttatataagtttattaaataaacatttggagataaaaagataaaactttaaacacaacaaatacctgatcattgttgctggcacctgtgaagttctcaactgagatagggaaagggatttcatctgattcatcttgattatcaacctatccagattcaccatttatataagtttaatatataaacatttggggataaaaagataaaaaaatttaaacacaacaaataccggatcattggtgatggcctcaactccacctcttcctgagatagaccgggaatggaagccgaaattcatctatcaaaacaaaacaaaaaatcattaaaaaacctaaatatatagaccaagcgggttccatgaggcacttctgttagaaaaacaaacacattatataacgtacaggtgtttcatgaggcagttgtgttaaaaaaaaatcagtatagaccaagtggattccatgaggcacttctgttagaaaaagaaacacattatctaaaacacatgtgtttcatgaagcacttgtgtttaaaaaagaaaaaccagtttcctcctacctacatgtaaacacaatcgactgaaaaaaaacattaaaatcacctcacctcagattcctcattgtgtcgttgatacaccaaacgattatctcgtttttcccacgccaaattcatctgtgagtagaaactgttatgctctctccagtccttgtctttgtgtctgcttaacttagacgccaaattcggctttatttctggtggcacccgtatgtctgactcctcctgtcctaattgcttgaagaaagtaccaggacaattgtatgcgatggtgttaaagcagatgcatggaacttgtgcaaacaccatacgcaattgagaggtgtattcgggcaattcaactttgctataaggctgccacttaatctgaaataatataatctaagtatttaatatagaacaaatgcatactgacaaagagatgagattttattaggtagctcatcttccttcatgttttgaaggatctcttgatagtgtcccagactccctctggcaaaaattttggtatacggtttatataccttttcccactcaaccattaaaagaaaactggatggagatggttattgaaagacagtaaatcgttctaatgcaaatacctacacgaaataataaagagtagttaacattatacacataatcaacatcaacataattagtttttgtttcacttgaaaactttacctgcagagcaaaggcaaaaccgcagagttttgtggtggaacctttagtaaaagcctccttctattcgcataaagattcgtttaggatagccaacattgctgccccctaagcatatttgttgagcttgtcttttcgtagcagtggaagaaacattggagatatagcttaggtcttgtttgacatgaccaaagttaccaacaagaaaaggagataggccataaagtatggctctaaattctgttcttcaatgttctttgggacatcttcaaattggatttgcaaaaggtgaggagaaatgccgaaggccttactggttggtctctcctttgacaatctctgagccttttctttacttaatttttagagctctggtatcctgatacatgtaccaagcaagcatacaatcaaccatggaattcgctgatgacaaatctagtaagaagtaaaattaaaaagatatacctgcttcccatcaattggaagtcctgtaatgtagagaatgtcttccaggccaaaatcaaccatggaattttctgctggaaaggaaaaagccttttgtttgtcatcaaagaatgacatgaccgctgtaagaagcggcagatttagcttatgtttagattcttcaaacttcaaaaagttcttgaagtaggtagcttgaacaagctctgatactcttcgatctactttccaagacataaattttttcatgtgcatggctgtcttagtacttttcttctgctctcccattgtataagttggcctcacctgaaacacaatgtgaataatgcatcaggcacacaaaatgtgaaacaaacttggtctaaaccgagatatgttggtaaaaacttggaaaaaaaagaagtgattcaagcaaaaagacggatttttatcggtccacgatgtgacaatctttggaggcaaaccacatctacacaaattcatctatcaaaaacaaaataagatcaaataagatcagggagtcctctcttcttcatcaaacaaattctcacaactaagaacaaacacaacccaacccataagttgttttacaagagattaatgaattcaagaaatctataggacaattagtttgactcggaagctagccctaagaaaagcgttattactcaactttcggtattatggtagtaaaaagagaatctgattcacataattgcattagaacatctgaaacaactgcataagcacagaacagcaagccaatgaacacaaagatatgagatgagatgagagggagaattaagagacataccttctttatgtctgatacaggtgaatgatgagagtcacttaattggttaatcaataatctgcataaacacagaacagaaagcaaatcaaatgaacttctcatttttcagctaaatcatgaaaatgagaatacgattaatatcatagcatcagaacatctgaaacaactgcataagcacagaacatcaagcaaatgaacacaaagatatgagatgagatgatatgggagaattaagagacataccttgtttatgtctgatacaagtgaatgatgagagtcgcttagaaccagaggagagaagagcggcgaattccccttttctgcttggaaaagagaaaaagcagtattggggcgaaattcaagaatgatgtctgtttccaaaaaaagtttttttttcccaacaaactttaatttcattaaagtccaaatgggcaagaacaaattacaattaaacattaaacgaacagacttaaaaacgtatcggacgattaaaaaacgtatctttgctatttttctttgtttgatcgctatctttgttctgttccatattaatccaatttctagaaatttttttgtttcaaaacgatacaatttttaagttttcaatgcactattaattagtgataaattgtagtttttaaaaagaacaattgaatatgattggtttagaattattgaaaattgtaaattacaaaaaccaaaacatttttaatggatttttgatgtgttcttttaatatgtgtgaaaagtgtagaaattagattaattaggaacagagggacgattatttttctatttcgatcgctatctccgtcttctcgagagttaccactgtgtaagatattatattttgttaataaaaaagcttttttttaacaaaatatttaaaagactttataagcttttacaagattctgttataaaaaattataaatttgataagctttcattgtaatacgttttatcagatgtttgatttctcatatacgctccaatttgatacatatattatttattggaatgctcagatttttatggtttataaatatcttacaaaagcttctgtacaaacccaatctgagataataaaaaaatatatattgataaacttatgtaataagctaattggaaacactttataaaaagattaaaaacatcttataaaatataagcccattataaaaaccttatactataagcttttaaacaatccgacagttcacgaagccaagcttattgacagaaacccaaaaaagaaatatcaatttacaaagtataagatgttttttttttccgtcccaaagtataag

SEQ ID NO: 173 - DNA, 110352 bp, Arabidopsis thaliana
aagcttgaagatatagtgtactcaggtaatgcatgagatcattaatccaaccttattcgtaaatcaatatttggtactccctaaactttatttaagttcaaacctcatacagatggacactgcaacaagtaagaaaaggagaaaagaaaggtcagcttatattgcagataataggaacaaaaaagattccagcaacaaaggtgacacttctttctctttgtcgtaccatacaaatcaatattgatatccagtaatacacatgtttgcctaaaattgtaatacagagaatgaaggctcaagctctaacagcaatagagctgcatgtgctgcacctatttcacaaccgctacaaagctcatcatcacataatacattgaaagatatcacaaatggtaatctatatggctcaatgcaaatacatataatatcttatacattatactaattatgtatgaaacttctacagaaccttctccatggctaatcgcccaacaacttattatgaataagagaaaagagaaaaggaagcacatggaaacacgtattgttctttggatccttgaattgtaaagctaattgcaatttacatatttcatacattcatgtatgattaattcatatcttattgtttatatactttgttaatagatgttccatcaagcagcaacacaattccaagttttagtcacttagtcgacactaataacaacacattctctcaacctacattctcaaatcgtgcttcatcatctaattccccaaacgcattatacagttctcaaggtaacaaatattttagtttagactcccaatattatatcaaacaaacttttcttaccttttacagattaccatgatcttggtgatgcaacacacatgtgtgagcattgtaatgctttcatgtggtatgatgagcgtgtcgacaaaagttttcaatttgctgcactcatggaaaaattcaactccctatatcaccaatgcctccacagctgctccttgacctgctttatggaaacgatgaaatcagcaaaaattttaaagagaacatcagaccttatgacaccatgtttgcatttacttctatgggtggaaggatagatacatctataaacagaggacgaggaccacctattttccgactgcaaggacaaaatgtccataagattggtagtttgcttccctgtgatggtgatcctgcaaaatttcagtagatgtatatatatgatacttctaacgaagttcaaaacagaatcaaaaacttcaggtaactcttaattcttaaacataatctacatacattctttaattttcaaatataatttgtttttcatatatactacttcaaaaatatcaaaaaggctaatcgttctttattttttaattattcaagttctaagaggacaacaccatcaactgaatcaaaacgtctacgtgaggatatcgtcgaagcaatcaagtgtatgcttgaccagtgtaatccatatgtgaaagttcttcgaatggcaaaggagcggtttgatcattcaatcgagatgcctaatctcaaactaaaattggtctcaggtcgttcaacaaatagtggtaagacttacaatttaccaacggtttcagaagttggtggtctgtttgttggagattttgacaactcagttgggccaagagatattatagtggaaacgaaaacaagagaattgcacgtataagtgaactacacccagcgtaactaccattgcagtatcctcttttgtttccctatggagaagatggttatcacatagatctcgagcttaaaaagaaaacaacaaattcagaaaacccacgaaccaaggtcagcatgagagaattttttgcatataagatcatggagagaaaagatgagtcgccttatctgatgcatacggggaagttatttcagcagtttcttgtggatgggttgaccatgattgaagccgaaagaatctcatatctccagtttaaccaaaaaactcttcgcgccgaaaagtattccagtgttgaagcttctgccgaaaaaggaaacaacgattcttcgatgtgtggaaaacgatatgtcttaccatcttcttttgttggaggtgcacgttacatgcagcagaaatatatggatgcaatggctctatgtcaacattatggttatccacatttattcattaccttcacatgtaatcctaaatggcccgaaataacaaggtatttgaacgcacgaggacttagcgcagaagatagagcagatattgtaactagagtctacaaaatgaagctagatcatctcatttgggacatcaagaacaacaatgtctttggtccttcaagagcaggtaccactcattcttttatatttatctttctatcactattatagtttacttttataattaatcaaaaatttataagtattttactttgcagtgctttacacgatcgaattttagaaaagaggtttaccgcatgcccatatacttctcttcctagagaaggaagccaaaattccaactaccgcagacgttgacaagtttatatgggctgaaattccagataaatacacacatccgattcttcacgaagttgtcaaagagatgatgatacatggtccatgtggacttgccaacaaaaattcaccatgcatggagaaaggaaaatgcagtaaaaagtttccaaaggattttacgagcagcacacacatcaataaagatggttttcctatctacaaaagaagagatgatgggagatttgttgagaaaaatgggattcttcttgacaaccgttttgtcataccttacaatccaacactactgctcaagtatcaagcccatataaacgtggaatgggttagccaaagcaagatagtcaagtatttatttaaatacatcaacaaagggaatgacaaagtcacagctagaattaaagaaggtactggtccaaatgaaatcaagcggtggtatgactgcaggtaattattctgttaacatccacataaaatttttgaataattttagcggaagatgcgttagcggtgtcttgatcaactcatatcaaattattgtttaggtatatttcaccttgtgaagcagcatggcgaatttttggttttgacttacatcacagcagcacttcggtacaaagattaagcattcatctacctggagagcaaaacataatttatgacgatgatgaagacgtagaagacgtgttgaacaaagaagaaaaccaaacatcgcaattcttggcgtttttgaaaacaaacaaaaaaattgccgaagatcctgaggcgagaaaatttacttacattgaattcccttcgcattttgtgtggaaaaagaaacaaatggagtggactctccgtcaaagaagtgtatcagttggaagggtatatcatgttaccccatcagctggtcaacggttctacttgaggatcctattaaacaaagtaaagggacctacatgttatgaagatataaaaacagttggagggattctgtacccaacatttaaagatgcatgttatgctttaagtctccttgaagatgaccaagaatacatcgatacaataatagaagcaagtcaatggggatctggccgttacatgagaaggttatttgcccagcttctaacgtctgaaagtttgtcaacaccttatcatgtttggttaaatacgtggaatcagctctcagatgatgtactatctatgcaaaggaaaatattgcaaaggccaggtacactataaaacaaaattttttttctttatatatatttatttataaaacaaattaatttagttttacaattgataaacaaaccaaatactgagaattctttttaaaatttgcaaaaaggaatacgatgtataagatgacagaagaaacacttggttaaattatacgaccaaatggttcttggtcgtaacgaaatatatattgttcctcttaacgtatatatataacattaaacacactaaagtctaaaataatcgttacgatctatttaaagctccaaaaaaccatgaattatatacgtaaatatttaacatgcatgaatgtgataatgatatagaaacaatatatttagaaaatacgttgaatgtgataatgacttaaggtcaattgctcgccgaatttctcaattccttctaaaaatgaaactgatagtttttttaaaatttgcaggccatgaaatgacaaatgagcaaattcaaaatcaagctttgttggaaattgaaaagttgttacgtaacagtggaagtactctgcgtaattacgaatccatgccatatccagaaaacaacaatttccctgcagcaatgaatacgttgatacaagatgagttgtgctacgatcgacatgcttgtgcccaagaccatctacgtttgttttccaagttaacagttgaacagaggaaaatatacgaccaaatcatcgaagcggtctattcaaactctggtggtgttttctttgttaacggatttggtggcactggtaaaacatatttgtggaaaacattgtctacgtacattcgttcaagaggagaaattgttttaaatgtagcatcaagcggaatggcagcactactgctggatggcggacgaacagcgcattcccggtttgcaataccactacaggtgaacgaaacttccacttgctcgatttcacctgatagtgaccttgcttctttgttactccgagcaaagttgattatatgggatgaagctccaatgttgcatagacattgttatgaagctcttgatcgtactctgaaagatatagtacaagccgacaaccacaaaccttttggtggaaaaactattacatttggtggagactttcgccaaatactaccagttataaccaaagggagtcgagaacaaataattcatgcgtctctcacttcttcgcgtttgtggaattcttgcaaagttctcacattgaccaagaacatgcggctaactgttgaggcagaccctacagaaaaagacaacatcaaagagttttctgattggattcttaagctaggagatggaaagctttcagaacctaatgatggcgaagcagctatagatatacccgaagacatgcttcttcttgactcacttcaccccattgactctattgctaattgcgtctatccaaatctacttcaaaatcttaatgatcaaactttcttcagggagcgtgcaatactttgtccaacaaacgatgatgttagtgaggtgaataatcacatcatggatcttcttcccggagaggttaaggaatacttcagctctgataaaatatgtgattttgatacttctgtagagagagacgctaacatgtctactgaattccttaatgccataaagtgttctggtgtacctaaccatgttttgaggttgaagttgggcgttcccgttatgcttatcagaaaccttgaccagaaatatggcctttgcaatgggacaaggttgcaagtaacacagttgggagatcgtgttatcgaagcaaaagtgttgactggaagtaacgctggtaacaaagtctatcttccgaggctggttcttacacctgcagattttagaataccatttcgttttcagcgaagacagttcccagttgttccttgctttggaatgaccattaacaagagccagggtcaaagtttatctcatgttggcatttatttacccagaccagttttttcccatgggcaactatatgttgcggtatcgagagttaagagtcgacgaggtttgaagattcttattatcgatgaagagggtaatcgtggtaaaacaactacaaatgttgttttcaaagaagtattccaaaatctgccaggtatgtctcacagattgtgaactcatcactgttattcaatcactatctcaaatcttaataaggctaaccccctttactctatttctaactacagattatggaagttagcagttctataaccatgacaattaaaatataaaggtacacaaatattgacacggttagttaatacattttcttttgttatattaatatttattgaattgttttatactatacatcaatatgacaaattagtataatataattattagatatgacaagtgaaggctttcaacacaaataacaatttgtatatatattactactatataaatcattttaatgttatgctttgtttattttcaactgttgggatatagagatgaaggtatgagcaacatacctttgccgttattatatgtgtcgtttaatagtatggtgcatcagctgatttgatatattcacttaacctgtcttttattctgcacgcataaaaaatttgatctcaatagttagggtccagttatgatttttttttgcatttaatagataaaaccagttaacgcttcctaaatcttatttcgcattgacagttaattatagtatttgctctcttttttgaacatttctttttattaactttgcagcggacgcagcggatgataccaacaaatcatgctgaatctttgtattttctttatccaccatcatcgttatattgatgttgagatggcttatgtgctatttttaagtttgtaaagagtaattaaggaaaatagaattcctctatcacttactttctgtttcagatgatgttcatgtatgctggtatcttctttcatatgtttctaatgactctttatgtacctgtcatcatcatgcaactctgttaatcttagaaagaaaaactaaaacaatcatataaagaatcatgtcactttggtaggatcaaccgtaatgctcatcatgaattaattggaagatatggttgttgacttttgtcctcatgaacacctaatcctcctacctacaaaaagagaatataaaagagactataagtaaattatctctaaagtctcaagcattaagttaaccagatactatttgaacactcgtggaagacgtgtatatttgatcttgattaaccataatatatgcaaatccacacaagagagcaaagtcaattaaacataccaatacagccatggggactctgtaaccagttttcctatactcacgaatcacttgagtaatctgagaatgagttcgtcttataatgaacaaaaacaaacaatcaatcaataagaagaaacccattaatttatattcacaacatttccaaaaatgctcatgttaaagcttacgaagcatagtatatggtaggaattttggttctcttcttagttgcagtttcagctttctccacatttatagatgcaggagtgtctattcagagatttaccactattcagagataaacccaaatcataattgcaacatcgttaagactcaatgaattacctctttgttgcgtttccggtatgaatccacctccatgattcaatggatcggtggctgcttcaggggcagctttcgaatgagtcaaattgcctttcagaagccgagatttatagttctgttgccaagcgagaactgagcaggaggtattgaagctttgatatgcagtaaacagctcaattttcctgggtaattgaagagaagaaagaggagaaagagatgggggtcgatgagaatgaattcacttacaatttatttacacgtatattattcttatcccaaccaattaattagatcagattaggaaattagtagtttaatttattttattttttccttaaaaaactttttagaaatatacactctcttatggtcttacattaatatttcagttactgtttcaaaaaatctcctcattattgaaatattttattttatcaaccaattaaactttaccataaaaactgattaatgctaaattttattttatttaataaaaatagaataaatactatgtccgtgcatagcacgggccatactgctagttattgcatatgtttaaagattccattactttgtatactcgcttcttctttgcatctggattgagctatagaggagttagtagggctaaatgtaagaaatattatttaatatttctcccctattatatggtcttgtaattatctgttttctattggaataatgttattatttaacatatttggtaaccaattaaattagtaataaaggagtttttcctaatcaatctctaccttgatggacggatgagatctaatcttaaggaaaccctaatgaggaataggtcctctctccacctataaatatatagctttagaccatcataaagatatcataaaacgcaacacgttaaagctaagtttataggcaaggtgagagaaacttaatcctaaactaaagatcaagacttcaggaaacctattcatgaagacatctccacgacaataaagagaggtaatccgataaacctcctaatgattctattatgtgattaacctagatgtttaaagatcttagggttcatataaaattaacttacactaaaggcttatgttgtggtcgtgattggttggtcttaatttttttattttttttaataccatggttggtcttaatttgcaatgcaccattaacttcacctaacgctctttattcttaagaaatattaattttattttttatattaacaattaatttgttcactcttttttacttaaatatgtaaaaatgtttccaaaactttaatgattgaactaatataatatccaattatcgaacctccaacatgaaaatttctaatcaatatttaaatacatattgtttttgtttaatttaaatattgtgtttaaatctcttcaaacaattagatattataatttaatttctctaagaaacaaaaaaaatcgaaaacccatgtatatatttcatactgttttttagcctacctcttgaatgattatattcttcaaatttagtgagaaaaatatttcgatgtatcccaactaaaattctatttttcttgcttcaatttatggtttgtttttctcttttcataaataactgataaaaaaataaatagaatcaagtcaaaccaaattaaatcgaatcaagccaaaccacttttataaagtatatattccccattgtgtcactctcataaaataatattgccaccgttgcattatatatgatgataaattttctagaactcatatttttttttaaaatgtgtgttttaaactaatacatctaaatgaaagaagtgtttcttttgcggacaagttttcctggcttttgctatcccaattgaattggtttttttttgtccagtatctccgccttctacagttgtgatgcgggccctctttctggcatcaccgcctcctataggcggcgttggctagctttgcttttttaactcgccgtccagtgtatcaggtagttccagttttgtttatgcgtttgtttaattgtctcgattatgaagagttccaatatgtgagattgttagatcaggagagttttctcagatctacttctactgacttgttctgttttaccgtcgggatttcttgttttcggcccctatggttttttggcaaggttgtttgttgattgcattgttgtatctaccagttttcttcgttttaattttcaagacagttatgcgcctaagttgttgctgaaagctccatcggtttaatctccacgcggatttccttagagttcgggaggaaattactttgagaagttcttttctttgcagatttgataatgaagattggtgagattctctaattaaaaaccgttaagacttctttgcttgaagatctggcgatttctgatgattttggagtttcctaaggattcttaccaaatcgacaatgaccaacaacgatatatgcttcacatgtccatgcgtcttaaccttgcttcatagtctcacatgtggctttgcgttggaatctttaaatcttacttctacaaagggtttagtttcctagattggactttctttaagttgggcttcttcttataagttaaacttgttggttctttggttatgcaacatggatgcttgtttagataatctaatattgtaaaatttgatgtgtttgtcgagtcatgtaagtgaaagattccacttttgcaacaaaagttttaaataaagtgcaacatttatgagaaagaaaaaaaaaaggttttatgcaaaaggactctccaaatgattttttttgctagacaaacatccatctcaaaaaaatacaggtcaatatcacagtctcaaaagtcacctacaatatagtccttccgtatatcgatgacgtaacagtcgataactccgttggaagacataagagttttgttaaacaaaccctccatatatttttttatttttgcaagacaaacctcaatgtcaaataaatacaatattacaatctcaaagtcacccgcgatatagtcattttgtatagcgatgacatgacaatcgataattccgttaaaagcataatggatatcaaaatagacctttgttttgcttttgttgaaaaccacatgattgtgtgagtttcgttattagaaatagaattgagggaaataattagagttctttcatattatatcttcttctttattcatatgaagtttggagattcatttttcttttccatttcgatcttcatccatttcgatgtatgtgtttgttgaattgtgttccacatgatcaaaaatcttggtttgattttaagtgattcatttacagttttgaagatcccaatgaaaaataaatatgaatctccaaattttcagataaataaaaattcaataattttggtgtatattgttttatgggtaatattagtagataaccaaataaaacatacaaattaagaaactagcagagagaaagttttttgttacaaaataaccatggatcccacgttgtcggaagaaaggaaataacaaatctacccttcatttgttgtaagatgaacagtaaacgaaatacatccgtgtaatttttcaaaatagcatgtaacattaaaatttcacatgttatatttagtttaaaaacatgctatttcaaaaaacgttatgaatttttaagaaaaaatattcttatgaaattcttttacgtgaacagaatcttaaaaaaaaaaaattatatgtgattttaataaaaaccatgtattactaaaaaataggaatatatttttaaagaaatcacgtgtgatcttaataaaaaacgtgtattactacaaaatatcatgataaaaagagatattaaactgaatagaatgttttttccaaaaaataccaggtgctttttaataaatactatgtaataagagaaaataacaagataaaaagaggatattatgttatcgcatgtatttcggaaaaataacatgttacaaaggacatttacgtaattacacgtgttttccaacatgtttccgacaagatactgtgattcaaggttagtttgtacattcttttcaaatctatagtcatttattataaatactcttgttttattgtatgttttctaatgtagttattggttgtcatgtcatcactacacaaaaagataatattatgagtgatttttaagattgtagtgttgacattcatttatttgatatgaagatttttttttacaaaaaaagtttacatagaaattttttacactaaatctttatgtttttaatagagttatcgtctatatcaaacctacatttatttgacataatagtttatcttataaaaaatgacttcatctgttcttttttatttgattggttaggaaaaacacacatattaagttaaacatattaaaattgttaaatgtattattttttgtattttacaattttttataactttaaatcaataatattcaattatttttatcaaagtttataattaattaataataactaataaatatttcataaaaaatctaaaaattaatcttttaaaaacttatttttttcaaaaaacagagagtgttaaatagatagatttttttacacaaaacccaaaaaaaaaaactaagaccttgaatgttttttagattttgtaagagtttttgatttttgttttttaaaaacttattttaataccaatcaagattttaaaattttggtttccctacaatttagtaaaactattttattgtagttttccattcatatttaagttttttagtttttctaaagtttagaaaatctagtttttactcaatcaacgttattttttcaaaaaccaaaaaccaattttttaggggtttttaaaacaaaaatataataacaaaaatctaaaatctatagactaaaatctaaactcaaaaactgaatcgaaaatatccattcaggcctaatacatccaatatttcaatacttcttaactcttaactcttaagttttaagtaattaaatatataaagatctgttgccaagcgtaccctttttataaacattccaaataactatctccattctttggagttacccaatttcgacgttgaacacaaacccttgcttctctcttctctgtttctctctcgcagcgaaaaatcatggcgattagctccttcaagcatgaacatcctcttggttcgttttcgatttaaacctaatcgatcaatcttgttgatctttgtgtatctctctctcatcgtagggatttttttagcgactaggtttaaaaattctcaaaatctggttacgtctatttcaattgcttctgagtttgcatgaattgatccttgattctgatttccaacgatttcaattttgattgcgttaacagttataagaatccgcaaaattatatgttgaatgattttatcgccgattctgtattgtttcgtgaagtagtatgcataatctttgattgaaacaagttttgtgtttattgatgcaaatacattatgatctttattcaagtggagatgaatattgatgttgaagttactaagtttcacttgtctctcttgtgttccgtggtcgagtctctgttgttcacggggcgtagaatcgctatttcagtccctgtacataatctttgattgaaacatgttctgatttggtgctgcttttgctgaggaagcaaaatacattatagtctctgttcaagtggaatcctaagatattatcactgagtatgtgttgttcacgaggcttagaatcactattttagtccctggagcctggagtagtagtgtacataatctttgattgaaacatgttttgattttgttctacttttgctgaggaagcaaagtacattatagtctctgttcaagtggaatcctaagatattatcgctgagtctgtgttgttttacgtgggttagaggatgttgatgtgttgaaaattgatggatctgtgttttttttgctcttgaatgttacagaaaagagacaagctgaagcagcacgtatcagggagaagtatccagacagaataccagtatgaattttggctattttcatttaagaaaattgcatagcttttgccttattctctctgaaattgttgcaggtcattgtcgaaagagccgagaagagtgatgtcccggatattgataggaaaaagtaagtccttacttctcttgaggagttggatataatctctttcttctcactgaaagtggcttcaagcccttttctgagaaccctacactccctcacatttagtaatgaattggttaattggatagaaataatttttttttattgaaagatctggaggaatttctggttttcatggtttgttgcttagggataatgaattggctgacttactattcaaaactttaggtacttggtcccagctgatttgactgttggccagtttgtttatgttgtacggaagcggatcaagctcagtcccgagaaagccatcttcatttttgtcaagaacattctaccaccaactggttagtttcaaacacgttccttaatcatatacttttccagttcaaggaatcatatctttttctcagttgagctaatagtagtagtgttatccttttattgcagcggcaataatgtctgcaatttatgaagagcacaaagacgaagacgggtttctatacatgagttacagtggtgagaacacgttcgggatcttcttctaatgcgcttggaatatgtggatgcatcagattatcaatgtacagtctgtctatttctctgcttgtctctagttttcatgacattggacgaagcttttgaaacttgcatgctatgttattaacatgataaggtcttccgttcatggtgttaatttggctttatgctacacttaatttcaaacttagtcgctatatatagttgaggtcacttggtgtcctccttgaatattggcccggcctatttcactagtcgttgaaccgttacgatttctatcttctcaaagttagctcgaccgtcaaatctctaagctcttgcaatctctgcttctaaggaacacaaaacagagataactttagctataaatatttagatttcaaaagcaacttgatttaggtaaatttgtgcacactctagaatagattatcatctgttacagattattactgtacaatccagcaaaaactaggcctgggatttcggattaacccaatgaccgaactgaacaaaccgtttttttggttctgataaccgactatgaagggaaggctaaaccgatcggcgaaattataattgaagttcggttctcggttcggcagacataaccgatcagttttctcggttaatagatactataaatataaagataaaaacattagatctaatctttttagcttcttctccgtttccttttgatcctcatccatggctatttagtcaattctctctatctgcatgtggttttcactatggtagcacgtcggggcatatttcgttacggagatatcgtcatccctcgctatcaccgtcaccgtcacagacgtagatctgctgattatgaagagggtagcggcaccaagataccatcaaccctaatttttaataggtttggatttttagttattttgggtttaagtttgtttttcgttttggcccaattattggtttgtaattataaaattttgtttatcttcgcccattctataatttttgttttgacccattatcttgattttggacttattcggtataaactaaccgaactaaaaaaaaaatcggtttagttcagagttgattttgaatcctataaccaaaccgacccgaaccaaatctttattcggtttaatttgacaaaattttaaagaaccgaaaaaaccgattaaaccaaaccgaaccgattacccgaataaaccgaatgcccaggccaaaaacaactgaaaataaaaaataaaaaatgagataggagaatatttaatccgacggtggagaaatgttgatataataaaacgtgatacagaggatcataaacccgcaacatgagaaacgtaataagttaagtcaaaaaaacgaaaaagccagaatcatatttgtggctctggtttctccatccaaacaaaaacaacacccaaaccttgtccacaccaaaatgttaaactcaaaatccaaccacacacacacaatttctcttcctctctaccattaacatcgatcagaaagaccgagagagagagggagaagctgattgattatggctgctgcttcgatttctgcaataggatgtaatcaaactttgataggaacttccttctatggaggatggggaagttccatctccggagaagattaccaaaccatgctctccaagacagttgcgccaccgcaacaagccagagtctcaaggaaagcaatcagagcagttccaatgatgaagaatgtcaatgaaggcaaaggcttatttgcacctctagttgttgtcacacgcaacctagtaggcaagaagaggtttaatcagctcagaggaaaagccattgccttacactctcaggtttgcttgtcttataatcattctcttaagaactagtcaaagaagcaaagttttgtggaactgggttcttttgttctttcaggtgatcactgagttttgcaaatcgattggagcagatgcaaaacagagacaagggcttatcaggcttgctaagaagaatggagagaggcttggtttccttgcttaggtcttaaaaagaacaaatctttctctctgcttgtgtctgatatatacactcacaactcctcttgttgttcttgtctagatgtattttgtccaaacctataatcttgatttttgttacattgcctttgagggttactcaaacacacataactgctgccattctcatctgaaaagttgttcaataaggtcttagctgaactagttttctcagtcacatagagatacaaaatatgtaatattgccactctttcaacagattaaaaagcctaatcataactctcaaacaattaagggattgaaaaagactgtaagttttgctttctattgaagcatccctaagatcggagaggtattgagagctgcagttttttaacaccgtgagcttacactgattacttcaagacccaagtaagattgcataatatgtcaataaagttgtcatcgtggaaacttgatatatatggaactttacctagacattctttaacacaaactctgtttctgctagctaagcattcgttcccaaaggtttccaggaggttgacttgttgccagttgccttaaccttgattaggttgaaaatttgggtacgagtaatgttacagaaccacacgtgggaggtcacacgtgcgaaatcaaatggaagaaggaattaataagaggctgacgcgtgtcgactgaggagtggcagactcaaacatgccgttaggcccttctatatgagcaatattcagctcatctttctcttttatcaattaatctgtaaaatctagaatctctgagaacttttctaagctagatatctcacatcgagactagcagatccttgggtgttttatgaacatcgattgctcattgtaatcagggatttattcttaatcggaattgattttacagtgaaccggaaagttatttgtatcaaaggtatcaaagctctgtctttccttggagtcatggttcatacacgttttcatgatgagtcgaaggagaagggaaaagaggtggaaggtttggatccgatggaggagaggatggcgaggctggaggcgatgatggaagctcatagcaaagcgacgatgaagaatctggctgatatgatgactgcgatgagcagatctacagctcagaaacagccggatgagcagtccagtggtgagcggagtctacctcgatcatcaacttcaacggatgatagagtggtttttcaggatgtccgatgagaaaatcgaccagagcaggatcaacgacgagacaatcgtcacgaacaggatcagcgaagggaaaatcgtcatgatcaggttcgatttgaaaacccaaacaattatggtaacttgacgcgtttgggtaagattgatttgcctcgttttgatggatctggaatcaaagaatggttgttcaaggtagaggagttctttggtattgattatacccatgcagatctgaaggtgaagatggctgctatccatttcgatggtcatgctgcaacatggcatcactcttttatgcagtcgggtgtaggtttggaggtgttgtatgattggcctggttatgttcagtagttgagagagcggtttgatgatgactgtgatgatcccatggctgagttgaagaagctaaaggaaacagatggcattgttgattatcataagaagtttgagttgattaagattcgggttaacctttctgaagaatatttggtgagtgtttatttggcaggtttgcgaatggacactcagatgcatgtcaggatgtttcaaccacaaacggtgcgtcactgttttcgtttgggaaggctgtatgagaaggcacatcctaagcgtctttcttcaacaccttggcaacctaagacaagtggagcagctggtactttgaagtcacctagagaggcttctaatacacctgacaaatattacaacaaggagaatcaatacactaaacctgagtttaaaccaaataatgctaggaagctgtctcaacaggaaatgagtgagaggagaacgaagggcttatgttatttctgtgatgagaagttcagtcctgaacattatttggtgcacaaaaagcaacaactcttttgtatggaagtggatgaagagtttgaagatgcgttagaggaattgactggtgaagaagagaagaatatgcctcagatttcagtgaatgcggtttcaggtatctcaggatacaagactatgcgggtaaaaggagcttatgggaaaaagaccttgtttatattggttgattcaggttctactcataacttcattgattcgaaggtggcggctaagttgggttgtcagattcaggatgcagggttggctcgggtctcagtggctgatggtaggaagttgaaagtggatgggaagatagtggatttctcttggaagttacagactacacagtttcactcagatattttgctgattccattacaaggagtggatatggttttgggagttcagtggttggaaactttgggaagaatttcttgggactttaagcagttggatatgaagttcagatatggtaatcagaaagtgtggctgcatggtattaaggaagggtctgtgagagaggtcaaggcacaaaaactacataaacttcaagaagaagaggttcagttggctatgttatatgtaaggaagtggttgaatctgaagaagatgatgatacagaacatcaggttttgggttctattaatgccttaacaaaagatatgggagaggagtcatttgtagagaaggttgtgacagaatttcctgatatttttgtagagcctacagatttacctccttttagagcaccacatgatcacaagatagaattattggaggactctaatccggtgaatcaaagaccataccgttatgttgttcatcagaagaatgaaatcgataaaattgtggacgatatgttggcgagtgggacgatacaagcgagttcaagtccatatgcttctccggtggtcttggttaagaagaaggatggcacgtggaggctttgtgtagattacagagagctcaatggaatgactgtgaaggacaggtttcctataccattaattgaggatttgatggatgaattaggtggctccaatgtgtattctaagattgacttaagagctggctaccaccaagttcgcatggatcctcttgatatacacaagactgcttttaaaacgcataatggtcattacgagtatttggtaatgccatttggccttactaatgccccggcttcctttcaaagtctaatgaactcctttttcaaaccattcttaagaaagtttgttttggtgttctttgacgatatcttaatatacagtacttcaatggaagaacacaagaagcatttggaagctgtgtttgaggttatgagagtgcatcacttgtttgccaagatgagtaaatgcgcatttgcagttccaagagtggagtacttaggccatttcataagtggggagggaattgccacggatcctgctaagatcaaggcagttcaggattggccggttcctgttaatctcaagcagctttgtggttttttgggattgactggttattataggcggtttgtaaggaactatggaactattgcaagtcctctccatgcgttaactaaaacagattccttcgtgtggactactgaagttcagcttgcttttcaaaaccttaaggacacatgtgcaacactccggtgttagctctacctcaatttgataagcagttcgtagtagaaatggatgcgtgtggtcatggcattggtgcagtgttaatgcaagaaggacacccattggctttcatcagtaggcagttgaaagggaaacaattgcatctgtccatttatgaaaaagagttattggcagtgatctttgttgtgaggaagtggaggcattacttgatttctagccactttatcattaagacagatcaaagaagcctgaagtatttgctggaacaaaggctcaacactcccatccaacagcaatggttacctaaactgttggaatttgattatgaaatacagtacaagcaaggcaaagagaatctggtggccgatgctttgtcacgtgtagaggggtctgaagttctgcacatggctctatctgtggtcgagtgtgatttactaaaagagattcaagctggttatgtgacagatggggatattcaaggaattatcacaattctacaacagcaggctgacagtaagaaacactatacttggagtcaaggagtgttaagacgcaagaataagattgtggttccaaataacagtggaattaaggatactattttgagatggttgcattgctctggaatgggtggacactcgggtaaagaagtcacacatcaacgggtgaaagggttgttttactggaaaagcatggtgaaggatattcaggcattcatcagaagctgtggtacttgtcaacagtgtaaaagtgataatgctgcctctcctgggttgttgcaacctttgccaattccagaccgcatttggagtgatgtatctatggatttcatagatgggttacctctttcgaatgggaaaacagtgatcatggtggttgtggatcgactcagtaaagctgctcatttcatcgctcttgctcatccttacagtgctatgactgtggctcaggcttacctcgacaatgtctttaagctccatggttgtcctagttcgattgtaagtgacagagatgctgtattcacgagtgctttttggagggaattttttacacttcaaggtgttgaactcaaaatgacaatggcttaccatcctcaaagagatgggcaaactaaggtggtcaaccgctgtctagagacctatttaagatgtatgtgccatgcatgacctgagctatggagtaggtggttagctctcgccgagtattggtacaacaccaattatcacacagtactatgacaccttatgaagctgtttatggtcaacctcctccactgcatttgccttatttgccgggtgaatcaaaagttgcagtggttgcccgttcaatgcaggagagggagagcatgatcttgtttcttaagtttcatttgatgagagctcaacacagaatgaaacaattggctgatcaacacataactgagagagaatttgaagttggagattatgtgtttgtgaagcttcagccctataggcaacaatctgtggtgatgcgaagtacccagaagttgtctcctaaatactttggtccttataaggtcattgaccgttgcggtgaggttgcttataagcttcaattgccggctaactcacaagtgcatccggtgtttcatgtgtcacaattacgggtgttggttggtactgtgacaacttcaacacacctacttcggtgttatctgatgtctttgagagagaacctgatgtgattttggagaggcagatggtcaagcgccagggcaaagcagtgacaaaagtgttagtgaagtgggttaatgaaccagtggaggaggctacttgggagtttctgtttgatcttcagaagaagtttccacagttttctacttgataaccttgaggtcaaggttctggagaggggggagatgtgttacagaaccacacgtgggaggtcacacgtgcgaaatcaagtggaagaaggaataaataagaggctgactcgtgtcgagtgaggagtggcagactcaaacatgccgttaggcccttctatatgagcaatgttcagctcatctttctcttttatcaattaatctgtaaaatctaaaatctctaagaacttttctaagctagatatctcacatcgagactagcagatccttgagtgttttatgaacatcgattgatcattgtaatcagggatttattcttaatcggaattaattttacagtgaaccggaaagttatttgtatcaagtaacatcaaaactattaagagtggaaatttttttgaagtttaaggtaacattttaacgaatttcaaacaaaaaagctttccgctgccggaatttgaacccggaattcacagccaaatgtaaaaggatctagatgatgagatttaaccaaagtgctacagcaaatcttttgatattatatgaatttagaatgtataaatttagatgtatatgaatattttatttcaaattaagattttgttacatattatagggttacatacataatcttttatattttaaatattagatttgttttttttttgtcaaccgatatagattagaactcaaaagaaccaatcccgagggatattgtttacatatgtgacatgatgtgattcggtacgaatttttcgtgccaatttatccgtgtttacatttgcactacgagaaattaaagataaagaaaaatttgtgaattcttccctgttgttctgcaactcctctaaatacactgaaaatgtcggccattcggttggggaagacaccatcttcaccaagtctgaacagtctgtaaaaaaagctacgtcctggttatctgctccatttatacacttcatcgcccaaagaagagcttccacttcggtatgtaggggggaaagacttctacgaacgttagtggctcccattgttggcgactctccaagagatgatagacagaaccatcctgttcctgagaactgatcacttgctttccaagatctatcaataaaacaccaaaatccagaaaaaggtgaatcttgtgataaatccctaacccgaattggagtttctaaattcaaagaaccatgactttcagtatgaaactcaacttgagcctcctgccacaattggacatctttttccgctaaaagcaaaatctccttcggatctttatccacattttcaaatactttttcatttcttgctttcgagatataccaaattatccatggataaagaaccgaatcgatgcctgaaggaattctccaaaagaaatgatccaaattcgtaaaaattgaatttgtaggaaaaattcctgatgccgatggaatttgagaaagggcccaaatctgctttgcaggatagcattgaaaaagtgtgtgattgattgtttcctttggagcaccacacttaacataacccttgtcacaaagtatacctctttttcgtaagttctccgataccgacacactcagatgatatttgccataaaaagtgacgtagctttagtggactgcactttccactacatatattacatttgtattataatacataaagtggtcgtttctttgatattattttttttttctttccgaaatcctaaaagaacaaaaaaaatttatcaatataatatcatttttcaatttgatggaatgtcacaccagttataatatagatcaccaaagttaatcgaacagtaactacttttagaggtaattaatttcaattttctaataataaatagaaaatattttgttagatgaaataaaaagtttgtaatagatatatatatatatatatgtaaacaatcttttacaattgacatcaacatattatatcaaaacaattaagaacagaacatatcaaagacaaaactatacagagagaccaaagagtttcatatctcaaaccaatcaggtaacgtggagttttgaacaattaacgtggaagaataaagattagaaaagagtttcataccacaaacctaatcagataacttcaatattcttcatttttcatgcaacatcttggaaataggatgagatctcagttaaagtttgaatggagataaaaaaacttggcaaataaggaacagctaagccatagtaaccagagaaatacaaatgataaaccattgagtcaggatcaagatcaaaggcgacgagtctttcttgagacgtaagtgagaggataactttattggtgtccttggaaatggttaaaggcgtgagaggccgcgaggtgataccaccaaaccaagtggaagtagaatgcaaatcaaccgagaagatcttttcccatgtgttgttgttgtcttcaactctccaccaaaactcttgcttgcaatctttcttcaactcagagatacagagacgaccatcaagattgcataaaccaatcttgtcagcagagacattacgtgtaataaaaggcggtgtttggatgacttgaaacatctctgtgtgaatatcgaaaactacgagttttgtttctcttgttggatctccctcttcatctcctgtgagccagtgaagtgatccgtttgcaaatactggtcattgatcaaacaagatgtgatggtgatcaagaggagtagtattcacgaatctccaatttttttcctctaaatccaaaacctcgcatcttaccttcttcttacagccaaactagtttatacctccccgtaacgcagtctttaccaaatccaaaacgagtaaataatgtgaatggaactggttctatcccccgatagtctataagaaatttttgaattttcgctagacggagtgttgtgcacgtaaatgcagacaaggccatcgcagctctcggagatgtcgagaaaccctttgaactcttggaattccaaacactctttagtttcaacagaagcagacgtggtctccaactccaaggccattgtcttaaaaaacagagcgttgtctggatgatttaccaaatcatcacagacaaaaaggagttttggagattgtgttttctgatgagacatgtcttacctcgaaatctttggacgtgatcagagttctctagtgttttgacactgattggaatctgatgagagattttaccggaagcttcactatgatttcttcgacgatttcgtgaagtatatggatcttcttagactctattcttcttcgtttgttttctcttcctgagaacaaagaatttctcttcttctttgttgcgagtttctgattcttctcaaactatgtcatctctcttctttttaccctcatgaattcattgtgcgcccaatttacttactactatctcataccaaattcaggcggaagtggtaaagaaaaaaaagtttggggaagctagaaacagacaataaataacttaatattttcctctatttttttaaatctagttcgaatccttaatgcctgagtaaaatattcgttagatccgctttgactcggtattcgattcgatttgatttgaaaaatctgaatatctgtaaggttttgaagcaaagcaaatagaaaaatataatattcgtaaaaattgatgcaaataacaagtattgatttttcaaaagttgaatatccgctttgatccgtattatatatatatatatatattagaatatagttatgtatatatatgaatatcataatataggttgtatatttatatattttcggtttgtattggtatataacttcagttttttgttctttggataccttatgtttttatgttaagatgttaatataatcatttttctttcatcttaatggcggattttgatttttggaattaatttgatggctttttcttgatcggtgatgtcaaaaatggttatgttatgttttttggaacttattttgaaaccaggtcaaacagtttttttagagaaaatatttagatgtatcaaaataggtatccgaaaatatcattaaaaaattctggatattcgaatcttaagatattcagtaattttcggatcaaaacaaatcataaaattaatcattcggttaaaacaaatcgaataccaaatattactaatttttaggatatttgctttgtgccgactcctactaaacgccctcacatattgcttttccttttcttttctttttgacaaaaacattatttccgtttttgacaaaagaccaaacatatataaaaaatacgtggagtactgaaacttaaatctaaacccaaaaagttagggcacagttttctccacttccaaacttcgtttatacacttcaagtaatatcgtttgctgaagagagggacgaaggcgtacgaacaaatacaaatcgcctataattgttacacaatccgctgtcgggctttgaacccggaatgtgcaaggatcaaatagattgttagagcatatagccattgtgctacagcagagtttttgttattatataagcttacactaatgatatagatttttgtaaagatttttataataaatttatttgtttaacaaattttaggggtaaatttgcatatatatttttgaatataattgtatttttccaataatctattaaattattaggatacaattttagataaaaagctcatacaaacaatatctgattaaataggatttctacacctcttgtcgttgtcacacacaacatagtaggcaagaagagatttaatcagctcagaggaaaagccattgccttacactcataggtttcttaagaactagttagagaagcaaagtccataagttttgtggaaatgtatttttgttctctcaggtgatcactgacttttgtaaatcgattggttttctcagtcacataggtacatgttaagtgatatttttaacatattatggagtgttttttaattgttttattgagtcttttattaaggaacaaatcattcctcgtgtaaataaggttttttttaggatttcggacttgtggaactaaagtgagcattatgaagacgaaatggaccaatatacagcttaagaagagaagatccaattactggctctttccatgaagaaaccgtaccaaccagtgcaaatatgttggacccccgatcgattgggcctgtccatcgatcggtgggccttttcttaaacttccattctccctggtttagggctgcgtccctcctcttctatatactccttcatttctatagtcgcaacatactatttactttacgttttaatatagttttaaggtgttattctgcttccccattttttttatacttttatttatttattttatagctttagatctttgatttcttggagacaactcctttaatactctgctcctctcttacaatgatcgcatgtaccttagtcatgcgtgagtagctttaacatggaatatactgatcggtgagcatgactacaccaagtggtaccatttcgtttaacaacggttgaggaatccccaaacagatgcgtttttagattctctttaggtgcatgctttagtgttataatttggttgttctctgactctgggctgcttagctttggtcggaatacaaattgatcacctaagaccaaaatctccactagtcttgcctcataaggctactggatgaagtgtatctatctagagaaagacaaactctaaagacagttattgtttgtataatcatttagacatctgattataatgcttgaattatttcctctcataaaagttcaaataattctcttacctagcggacctgccctaattttctgtaatggtccaacaagtactaccgttctacgcttctcttgttccacaagaaactcaaattcacactgcgtcctctaaataaagagaagtatggtgacattccaaagaaagcaaaagaggcttacgcagagttatgtgctgctcaaaacagagctcttataactccaacatccgataattttgcagaggttgatgttgctaccgtaacatggaaccattttgctagtgttgaggagaagtttttttgacagaagtctcggctaaactggctgaagtgtggagacaacaacgcatcattctttcactgtacaacacaaggatcataaacttttggtaccctgtatttcatctccggtgaggattaccgaaaaggccatgccgcctcaacaaacccaagtttgacagaaagctatcagagttagcgtatgatgaagaatgtcaatgaaggcaaaggcttatttgccgttttgcaccactcgttgttgtcacacgtaacatagacactcccctttgtagttgctgtatcgagatgtttattgtcgaaacctatcataagacttgtgtgtgccattcagatactactaaagagtaacacttttaaagagttacagtctcaaattaaatgttcaataaggcctctcttagcaacacaagcactatcatataattacaagtcaaataaatgttcaataaggtcttagctgaattagtattctcagtaattcacagatgatacaaacatataatattgtcactctttcaacagattaaagcctgagaaagtgtcttaagcctaatcataactttgaaacaattaactgattaaaaaacgatagtaagcttttctttctattgagttatcttgattctcgacaaagtaagggatctccaagattacgagaggtattgagacgcatgtgcaaatccccagagctgcagatttaacaccatgaactttcactgattacttccaagacccaagtaagatagtagcacaaactaaatatatgtatatagcgatacctcgacattctttaactcaaactccgtgctgctagccaaacattcgttcccaaatgtttcagaaggtccacttgttgccttcaacctagttcatgtagcaaagtttggtttgagtatcatcaaaacgattaaaatgggaaattttctaaatgagattgagccaaattgtgccttacaaatcttcgtctaaacatagtgcaaagtttcctccacctccaaacgccaaaaattcattcatacacatcaggtaatatcggttggcacctgcgcacaaattcatgagagaggtacctgagttaagtacacatacttgagtggatgtcaacttctcctaaacaagttactcttctttcactagatggtttatatcaacaatacaactaactaaaacaagtgtggatcaagtcttgataacaagaaccaagaaggattaggataaaaaccagctgcaaccaaatgttcttattcttaagatctgattttgaagagacttaagaattctcttcaattttctctatactcttcctcccataaatccattagctaactatacgcgatttcttgagaagtaaataataaaagaaggggttcaaatgattaccggtaggtctaaatatgcgtggttcaccataaatagttgtgaacaagaatgtctggcttgtaccctatcatcaaaaacacctaaagagaatcagtaataaggaaactaatcaatctccacagacaaacactaatacaattagctagcctgcctgatatttcctcttaggagtaggttgcagtggacattccaacagagctccaaacactgcaccttgtttgtctccagcaacctgcaccacaccaaatcatcacaaactaagatctaccccattcaaagagcatagaggtaagcaaacaaaccagtaaacaaggaccaggaagctctccacttcttcgcaaaagcgtacgaagtgatataccatgtttcaacgtactgcccttcatccgataaaaaagttaacaccaaaaaccacaattccaaaacctccaaacaagatacgaaaacaaacttccttacctatacaacaagatccatttgcatcctcttacaatattaggaagactcgcatgcaagaattcaaacaagttagcagtaataaacacagagctctctgttaattccctcatcttcttcaccccatcaaagtaatcattaccactttcttctactttcgcagaaacacgtaactcacaatccttatcttcaccaattgagataaaggttccagctttagcttgcccattagcagatttgcaattctcaatacactcatagctctctgttctaatgggtagaggtggacataactcagaatcctcctcgttcccagattgaggaacaacaaatgagaaatacgaagacaatgatttgcctacacttgaattcaacctagcctacacaaatcaaccaaacgagattcaaatccagacccatctaaggaaaacaacaattagggtttctgataagaaaatatcatacctttggagaatcggagttggaataacgaggagaagcagattggcttggagaatcggcgaagagattagagagtttttgtgagactttgtccttgagagcatgcattgtgatcagaaaggaatagtttttgatcggagatgaatagaattgtcggtgggggaaagggaagagaagatgcgacagagaagccagatgctcggagatggacaaatctgagaataattctttgggcaactctataattaaagagaccttagtcaaaattaattaatgaaaacaggatatattattattttaccaaaattaaaaaataaaatgatgtaagttattaacaatatttatatactagataaagtccgtctaaaaaattcgaatgtaaaatataaattatttaaatgtttatcaataatatttaaatttgaatagtaaatatgattatatatttttctaatatttaattttaatttttgtatcaaataaaattttaataatatacatttaattttactatacatcgtaagtttgtattatctatttcatcgtaataaattgtcatttagttctatacattccatttttttagtaatatgtagagggcaaaagcgcctacgatttattcataacataataactacactcagacatttcgacaaacatcaaatatatgtagactaagcaataacaaaaacacataatttggtaatccataagctaaacgattagcctttctatacacatgagtaaattggactatcgagtccttatacatttcatcttattaatgatatttgaatttaaaataataactcacatacttttttagtatttaattttgtatttccttaaacgaaatttcaatcttacaaattcgattttgccatataatttaaatatttgttttactatgataaaaatataatttaattatatacactccatcttatttttagttttccattttaattacaaaaattatatgtttaattttttgcatatagacatatgaattaaaaacaaataatttatatgttactttctttacttcttgattttcgtatgttcctttgcattaaataagtatataaacaattaagaattaagtagccgtcccatggttttgaatgtcttaatgtttgacatatctcatataaattgggaaaatttgcaaaactaacagcaaaaaaaattaagaaaattttttcgcttaaaatattctaaaataaatttcccgccaaaatgtttccatcaaaatcttttcccgccaaaaaatttcaaaaatagaattcccgccaaaatttcttttccaaaaatattttttccgcgaaaaaaagtttttttggcgggaaatagatttacaagggattttaaaagggttttataatatttacaagggattttaaagggctttaaaagatttacaaaagttttttaacgatttttaaagggtttaaaattattttaaaaaggttttaaaacatttacaagagattttaaaagggttttaaaagatttacaagggattttaaaagggttttaaaatatttacaagagattttaaagagttttaaaagatttataaaggtttttttaaagatttttaaagggtttaaaagtgttttaaaagatttacaagggattttaaaagggttttaaaagatttacaagagatttttaaatgctttaaaagagttttaaaagatttttaaagaatttacaagatcaattataaacttttgtaaatttttttaaaaccttttaaaatcccttgtaaatcttttaaaatcacttgtaaattttttaaaacccttttaaaatcccttgtaaatattttaaaacccttttaaaatctcttgtaaatcttttaaaacccttttaaaatcccttgtaaatctctttcccggcaaaaaaaattacaaggatttttaaaagtatttttttttgttgagaaaaaagttttataaaaaagttttgacgggaaattttttcttttttttgcggaaaaaaagtttggcggaaattattttttggcggaaaaaataaattttgactccaaaaatttggcgggaaaattttagtttccaattacatgttcctattagatgagggtaatttgttcattctgttaaagggaagaagtatttttttaaatggataacataaaagagtattgttgcaaaatagtagtaaaaaatagtagttttgcaaatctcccaaaaattaaattaagaaactaacaattttcaaaaaaacaagttgatatcttctgtattttatgtatttgggacaattataccccttgtttgtcatctctggtgtatgttgcatatcccagccgctgaaaattcgtcttcatttctcttctttgctttcttgttggatttgtctatctcatcctcttcgctggatttctatcttcttccctttcactagaacatctctatattcaccaatcatcatctcgttcaatgtcgacgacatctctcccacttacctctggaaagactaaagcaagggtcgtttagacttttttcatggttagagtgttatttacttaattgatacataataggtgctatatatttaattttcagttttttttttgttattcttgcaaatcaccctataaattattactttcttcacttcttgatgtcttaatgtttttttttctcactattggcacgttctaaagaaaatttaaattcacatgaaaataaaaaaatgattgttaagttatgtcatttatatggttacattatttgcattaagtaagtatataaacaattgggaattaagtagctacctcatggttttgatgcatgcttcatgaacgtggagatgcttgaaaaagatgcgtaagttgtgtaacatagttgttgatattttgaatctgctaatctagtttttttttttttgttacatatttgaaacaacgaaaatattttgtgatctcgaagaggagatcaaataaaataaccgactttggtgaatcttcttcgcttgatatgtctagaacatacgttagctatgatgaaagctgttgtgtttcaggttacaaatgaaaaattaatgagtcatgtatggagtggattgttatgtatcaaaactgtttgatttgatgtgtgatatattttatagttaggcaatatatggcattgtaggttgaaatttgttgcatggcatagtcatatataagctgtgaatacacccaaaaccgcaccgtaagaatgttataacagagtatcaaaatctctatatatacatatgtatctatgtattttcgttactatttgaactgcaccgcacttctcccgcaccgcaaaacgcagtcatcattcagactcattggttccgagtggagacgtgcgattcaactgcggataaaatgcggtgcggttcaaatagtaacaaaaatatttacatacacatgtatatgtaaagaatttcgttactatttgaaacgcaccgcactgtgcggtttggtcaccattcgaagccataataccaatgttttgcaggagtgtagtttttaatttagcttagtttgaaaacattataccttctctttgtacattacattgatgaaatataatatatatagcttcatctttttaatttcttgttcgttcatgtatatatttttaactcatcttatagctctattaactataaagttaatggatgatatgtgttctttcatgtacattaaacataccatctttaagttaatgtacgttgatttttagggattttctaatgttttaacgttttccaagtgtcaattgatcttctaggttggcacaaggatatcgcatacaccattgtgatctactacaagaaaacgtttcatttcctacgaaaatatgtcgtagggaatgtcatctaggaaattgaaattggtaaagattttgtaagaaatttcctacaaaatatgttcttaggaaaaatcgtaaaaaaatttgtagaaaacaaataagaatatttttaccagtttcctaccaaattttggtaagaaatttgttctttgggattttctactaaatatattctaggaaattaataaaaataataaaattaatttgcttttgataatcatactaattgcaaaaattaaatttggaatattacataatcattgatttttattttatttataacaacaaaaatattcattgattaattatccaaaataatatataaattaaattatttgtttatattaaatgttgtcatttaatttaataatagaaatacatactactgttaaaaaaaacaaatacaattattttaaatgtcaaagacttactatggttctaccaatttttattttggaaactcaatatgcgtttgttgaaggacgtctgatttcagataatattcttaatgcacataagatgtttaatgggttaagaaataattcttcacgtaaaccaaagtcatgacgattaaaacagatatgagtaaagcatatgatagggttgaatagaatttcattgatgaattattaaggaaaatatacttgtgcgaaaagtggatatcatggataatgtggtgtattactttaacccaatctaggggcttaagacaaggagatctgctttttccttacttattcatcttttgtacaaaaatgctaattgcgaatattcggaaagtagaacaaggaaagatgattacaagcatcaaagtatcaacaacaagcccctcagtttctcatttgttatttgcggatgctagtattttcttttgtaaggctgataaagaacaatgcgaagtaatattcgggtttcttaaaacaatatgaagcggtttcgaggtaaatgataaatttttcaaaatcatcgatctggttcggtcataaagtagatgactcttcaaaggaataaattaaattcaccttgggtatacataatatcgacggtatgggttattatctcgggctaccggaaagtctaggaagttctaagataaaaaatattctcctttgttcgagatagattacagagtagaataaatggtggtcggtaaaattcttatctaaatgagggaaagaagtgatgattaaatcggtagctacgatattgccaacttatgtaatgtcttgttttagacttccgaaaacagtcacttccaaattaacaagtgcggtcgcaataatttttgtggaattcgaatggtgagtctagagctacacactggatagctttgaacaaattatgttgtagcaaattggaatgtagtttagatttttggagtacaaatgattttaattcagctctaccgtcgaaacagttatggcgtttgataacgtttcgagattctctttttgccaaagtctttaaagagagatattttcagaaatctaatctttgaaaaatataaaatcatactctctgtcttatggctggagaactatttgttcagaggcatctatctcagttaatattacatgttatcagtaggacccgacggtctaatatcatttaagtacatagatgtacaaattcttcggcaatataggctccagaaaagtaccaggattcgatagtctcacgtcagtttctaccaaaattgttggaagataataggtgtcaatgtcattaaagaggttaagttgttctttaacacaactgccatgaatccatgtattaatcataccaatatatctctgattcctaagattgagaagccagtttaacgttgttagactataaacatattggtcagtgcaaagttcatcacaaagtcagatccaagtttattgtcacagagtctcaggcaccttttattctgggtcgaatgattcagatgatgtagacgcaaactacatgcacattcataaaaaaaaattacctaaattttttgggtctcttatcgagaatacgggagtaaaaaaaaaatctgctcttcaacaaacattaattattaaactattggacaagatgatatgatgatcaataagtaccactaaatgaaaaactttcattttgttttctcgttataccatattgaactaactggggaacacgtatgttgaagattttcttatcccaccataaccctaataagagactaagatagtttgtttaacacacaaacatttgttctttctacggatcaacaatatactacaagaaaattatcatgcacttgtaaaatatatatttcatataccaaagactaagttgatctagtggttacgcccctgaattacccaaaacatagagatctagtagattacgggtttgatctgcaatagaaatgatatgctctccaacacaagggcagaggtagatggtttttatggggttcaattgacccctatagatttgtagaaattttttcatttacttctaattttataagtaaaattcggaaaaatagttaaaacatagggaaattataatagatatgttcagaggaatgaataattaagtaactatgcataaaaatttattctttaggtggataagagagagagtgatgttttgacattcttacccttgtgagagagaaagagattggaaagaaagagaagaaaaaaggaagaagaagttcaactttcatgataacgcataagttaacggtgataaacaaattatcatgataaataaataaactaatgaataaattaacatattacgagaatggataattgctaatctattagttaccgaatgttaacatggtaaaaaataaaaataaaaaataagaattcggtatgtataatagttatctataatgtagcatacaatttaccactttaaaaaacatgttagggtgataactaaattgctaatgtataagttaatagtaataattaaattaccaaatgttcggatctattatgacatatccatagggtgctcaacggacccttttttctaattaaaaaaagttttagcgcctttacattggtacacaaagagctttttttataacctaatcgagtgtattcatattttaattattaagttccgaaatgtagtctttttgttttatagataatattatcctatttcaataaatgcttattagtcataaataaatatgttattatataatacacatcatataataaatgattcaacacggagaacatgttttcgacgtaagataaatagtgctttcactttgctacaattttttaaaacatgtttatcatactaatcaaataattaactatctaagcttgttaccgcccaaactctttttttgttgttggatataatgagtttatgttgatatttttcttgttaacgtgtatatgtgatgaagggtatttttgacattaatttgagtttgatgagagagaactaaataacaaatcttcatgcacagatacttaattattcattcctctgagcatagatttttaattcaccctaaaacatatgcttattgacccctataaatctttgttcaaaacatacttttagtttttaaataaagattgaccctaccaatacaaagtctacctcagtcactgctccaacagagaattaattacataatgtgtcctatcgtgaaagatgtacgaatccgtgaactatgaacctcttagccatgtagtatatacctccactagttatgttatgcgagatagttatctctgcacagctctatgcacaagttaccatcttcattgcataacttttggtgggtgtcttaacataaatttaattataaaataattatatttaattgtaggtgtcttaaaacataacaaacttgataaaagtgaagagatggtggctcacattctcctagaaaattatctaacattattgatatttccttttagttatattttaagacactctcttaaggggtgacagagttttattggtgacatacacacttaatagtctagccaataaaaatattaatttttaatacagttttatcatttaattaattatttagttattaaaaaaatattaaccaatcaatgagtgccaaatgtaaacatgtgtctataaaaatgtctttagtgtcggtgggaagacaccctctctcctctttctccaatagactttacttttattttatttttattcttattataattaaagacatcctcattatttgttcaatgaggatgctcttaaaatcatatatatgaaagttggtcaactctctccatatgaatgacacatcatcacacaagaagatgacatgtgtcattcaatattttttaaactaaaaattaataaaattaaataaccaaattaaatatatcatcattaattgattttcttaaaataaaaaaaaaaaacaaaaaaatatgttaataaattaagcactactttcattatataattttattattattttttttatagcaataatcactactctataatgactaaatgtttttaatacactattataaacctttaaaacataagacctaccaaataatttaataaacgatcatttctcttatatggatatatgcaatgacagaagatctaaaagtattgacttaaatgatactttcatttttgctttctttttattttttttatatgaaaactcttgaaatcttgttcagtttatatcaattctatatatttaatcatgagcctataaaaatgttgttggagtattatatcaggagaatatataaaaccagaaatagtttatttataatcaagttagacaattgtcaaatcattcaagacacgatcatatttctaatattgatatatgcaatgacaaaagatttaaaagtgttgacttaaatgaaattcaatttttgttatctttttattttcttcatacccctttttcatacgaatactcttcagattttattcagttgaagtcaatccaaactttaatcatgagcttcttacaatgttgttgaagtacataaaacaaggaattgatttatttataaacgagttaggtaaattttagaccacacaagtaacatggttacacataattatatcaaaatatcatatattgttgttatatgaattcatgatagtgaaaaaatattaacatcttataaataatcagctttatacatgaaaattagaaattgatattacgagttacaaatgaatctaactataaaaattgtaaatatatattatggatctagttttattaacaatacaaaaataaacataaattagcaaaaataacaatcaatataaatattttttaacaattttcaaaataaacccacgcgtagcgtgggtactcatctagtatatctaatatagatagtcaagttcactctagttgtgttactttttggattaggacggacccacgatcaaaagaatggggtttacatgaccccctctaaattatactctctatgttcctaaaagaatgatgttttggttttttcacataaattaagaaaagtaactttaatattacttttactacttttctgttaatttaataatataagttctacttctctcttctccctattggttactaataaaaaaaaaatattaacctacaacatcaatcttcatagaacaaaaataaaacccaaaacattaaactttatggaacaaagggagtaaatagttatattatatcggacagattagtaaacttagcttagttggttaaaaatgtcattttgacctctattacaagagttcaagccctcttttaccccttatttttattagtttttccacagattttgtttggtttgggtcaaaacgtattattctgctattcttttttttataacagatgttttattacaaataacttttgtaaaaaagcacaagatttgtgtattctttaattatagtttagatttatataattttaaaaaggaataaattaagtatatttaatatgaccctggtaaacaaccattctaggcctgccactgtttttggagatggccaagttcgctctatttgtgttactttagtgttattaagaaacctataaatgagctgatgatgttcttcaagcttcttcaaagtctaggtcgtgacttatatgcagcaaaccaccccccccccccccatactatgagatcttctatctcaaaagttttgcatttttgcttcctcttctttatattttcagctgagacagcaattcttcggagacagcccttggtgaggccgaaaaagttactggccaaaagcattccaaaattaagcaagttggtctatatatttccactctccacaaacattttgaattctttaaattctttgatttatttctaaacttttcaaaatagtaagaatttttgttgttgcaataaagttacatttcaaaataaaaaaaagtagcattcctcattcattgctccaatcgaaattctctgactactggtctgaaatctgacgaactcatgttctatttgttatcaagttccgttttatttatctttggaacaattcgcttcccttttgctttgctccatatcgtgaacgtccttttgctttgctcaacatcttgaacatcttttgatgccctattatttgcattgtatactttttgaattgtttctttggttgctctatcctttttcatgaaatcatattgaacaccgacagattattaacagataatattgtgataatacgtttagagaaacataaaactttcatgatcctataaacattcggaaaagtggtgcgattcatacgtgcttatgtaactttattatagtttaatatacgtaaacacttggcatttaaagaaaaacttgctagtataggcagagatatcctacatcccaccgcctccacctcctccacggccacttccaccaccacctcctcctccgcttccaccacccccacgacctccacctccacctcctctgccgcctccaccaacatgaccacctcctccaccgcctttgtgtcctccttggccaccaccgccgcctttgtgtccaccgcctccttgtccaccacctccaccgcctttgtgtcctccttggccgccaccacctccaccgcctttgtgtcctccttggccaccaccacctccgccgcccttatgtcctccttggccgccgccaccgccgcccttcattcctccttggccgcggccaccgccgcccttctgtcctccttggccaccgccgcccttctgtcctccttggcccccgccacccttctgtcctccttggcccccgccacccttctgtcctccttggccgcccccaccaccacccttctgtcccccttgtccaccaccgccaccgcccttctgtcccccttggccaccaccgccaccgcccttttgtcctccttggccaccaccgccacccttttgtcctccttggccaccaccgccacccttttgtcctccttggccaccaccgccaccgcctttttgtcctccttggccaccaccaccaccgcctttttgtcctccttggcctctcccaattccaccttggttatttttggattcttcttcttcttccccatcaaggacttcatctgtttctacaaaatgattctctccatactgtgcacaatttccatacttgcatgtcgactttgactcctccacttggttttcaccaacttttaaatattaaaaaaataccgttaaaatatatgatagatcatacaaaaagaagtagtaagaatatgactataaccttgttttgtgtcatcgatggaggcaacaaccttgatggcgaaaacagccgacaacaatagaaaccaaactattaaagctcgcgaattcatcttcattgtctttgcaacatgcaaaattaattgacgacctacacacctggttttttgttatttatacttgcaccttactctcaaagagtaagcatctaagaaatggtaaatattaaagaaaacccaagtggtgaagcatcttgagggcacatcatgaccagaaacaacttagttggcagcaggaaatatgtctgcaagcttcgttcaagtctctggaggcaacacgtaggatacgcgtcgccacgtaccaagatttttctagagtacttttaatcactagaggatttttcttatggcaatatacgaacactcttttaaaccatgtagcttccatttgcatgtgttcgtgttgacatgtatattgcgatgttcgttagagttgtgcttgtggacaatggacatagctttaccttgtaaaggtggcatcagatactgaccttgtccatgcatatggacgtaaatttacacttgatacaagaacgtaaaaaaaaattattttatgaatagcagaaatagacgaaaatgagattaaactatgtacatactgtaaacacaaataacatcctcaatattttgtttaatatgaaaatgagattaaactaagtacatactgtccacacaaacaataatttgttaccttttgttcgcttttccgaaaaatatttgtctttaattttttcgctacatggaaaaaggcacgtaaacaacaattttttccttacattgtgcttccttgatcagcaaggatgacatgcacccttgtccgtcgggttctctacggtggatcaggttattttggttacacgtttcttagtggcagagccagaataattagctatggggtcataattttcttttagatgcttacatagttttatgaccataccaaatagtgtagtagtttatgcatttcattgagctcgaagtaaaatagtttaaccattggaaagacaccgtcgtaggtttcaatgcctcagttttgattgatgtgaccttgcctataaatcacagaacaaatgaaataagtttcaatttaatcaagaaaacataaatagaaagtaaacacttttatggataaatcgaaacatttctttaaggtttttgtaaatgtcaaaaagtttagaaacaaaaacctttttttttggtttttcgttttcgttttggcttttatgaaacaacagaattgaaatctaagtattaagcaaaagaaattttgggtttcaattttactaaaaataaataaaaagggtaatattagtaagtaacctttgactcaaaaacaaaattaagaaaatagcacgagtcggaaaacttaagaaacaaatgtatttgagagagtgaaaaaatcaaaacagctcttaaacatgggtaaattgcaggcgacacccgttgaccatgttttattttcatggattgtcaaagtcaaatgtggttttcaccatttgtctttttgcctgcaaaatgacgcttctgcccttgcgcttctctcttagtaactgttgaaatgtacggtttagtttagcaggtttagttaagtacactgttccggttcagttgaagattttttgtttcacgttgacgcgattcggttccgttacaagtgagattatttccattattccgaagtgacatcaacatttaatgccctcaaaaagtttagatgtgactattgtcacaattaatgcaaaatcatcattacatcaaataatattaaaaaaattattgataataattaataaaaaaattgttgagataaagaagatgaacccaggaacaaagaattattgagaacgtacattgctgctgaagaagtgttgatcttgtttttgtaccaagtttggagccaaaacaagcattgctcgtgtaagtaatgaagttcttttaagaagttttttgttatgtcatattaggatcttgattgtgttcgaactccatttttttatcagaaaatttgcaaaatctatatttgtttgtttgaaatagtcaaatgataattggtatttaggtttataaatgtgtagtatcgacattccatttgttttttatatgtatagtatttttcagttgcatttaatgtgtgtctcctgaatttatgatgcaggtgggttatggatattcccgtatttactatggtcggtgagtggaaatgcaaagaaggagaatggaaatttgaacctgaggaaggcatctttggtcgttgtgtacgcgttcaggaaaccatgacgtacacggactttgtccgtacactccgagaggctttcagtttgaagtccaccgagatcaatcccataattagctactggatgccgggagaaatgtcagtgctgatagatactaaacgccctcctgtatacattgacagtcagatgggtctcgaaacgttttttttggttcgtggtgggtatctttctctcaacttgttcgtctttttcaataatacagtgaaggcgttcgggaatactgtctctaggtctcatggtgaagtttctgaaagtgaccgtgtgtttgatagtgctacaaatattgatgaaaataatgaggatgcagaggagcaagccgatgttgaagacgatacaacagaagaggatgaagtggaggagggcaacgaagatgatgatgggtgtgatgattatcttggtgtggatggatctattgggggaagtaccttgtatcctaccacagacggtagtgaaggtattggcgaagaatacgattacaacaagtggaacgatgtaatagtagaagaatatgtacaaggaaatcttgaggaagacgtcagtctcactcaacagactgctcaacatccaggggaattcagtcgtttattggaaacgtgtacgtacacgggtgttagtgtacctggcggagatacaggggaattcagtcgtctcttggaaacgtgtacgtacactggtcttagtgtacctggcgaagaaacaatttctccattgggttacggtacacgctgcgaagggcaaagggattccaatcttatttgtatagacgaagtcaccggggatgaagtgatcgacggtattggagcttcctcaactgggacacagaatgataatggggtagttaccgcagctgaggcttaccaagtgtataatgaatttcctaagttacatggtggcgagttggcgaatctcggtaacgatgctgctcctgtgttcgatgacttactcaattttcgagctgatgagacacaggttgaaatcagcaccacaggcgaaactttgtttgttggatgtgtttttaagaatagaaaagtcctgcaacaaacaatgtctcttcaagcgataaagcaatgcttttgcttcaagcaacctaagtcatgtcctaaaacattgaagatggtgtgcgttgatgagacttgtccatggcaattgactgctcgcgtcgtgaaggattcagaaagtttcaaaatcacttcgtatgctacgacacatacgtgtaacatcgactcttggaagaactacaataaacatgctaattataagctcctcggggaagttgtgaggagcagatacagttctacgcagggtgggccgcgagctgtcgatttaccacagctgctcctaaatgatctgaatgtgtggatttcatatttttgtttattatctttgtttctccatcatctagatgtcgttggagtgttggatgatgttggcgcattgactacagactattacggtctcaaactgagtttcaagataaaagatagatagtaagtgttcttttcatttgttttatttacaatgtcactctaaacgctaactgtccttatttctaacgtagcaatgaagtcttggagtgcgaagcccgcaatcaacaggcggagtacttggatggttactttcagagtttgggtaagggaaattttgttgtcgcactcagcttttggtttctaactgaactgtctaacccgaagctagagagccatagtgctatttcaaaggtggttgccaatccggacagaccagaagttgcggatatctcgatggtggttttttagctagagggaattaaccattattctccgttttaatataatataagactacatttcaattaagttttctttcccagttgttgttgttgtttccataagaaccaaactacatttcagtcgttgttgtttcctgtttccgtttaaatgttaatctaatttgttgttttatgtacgtgccttgttttattgttcaaatcctctcgcaatgtacgtatagtttctggtgtacgctatcgtgtacgtatattaattttggtgccttcaacatcaaaaactattagatttatacttatgttgtgtacgcaatttcccaatgtacgataaaccaagtttaatgtactatatagtgtacgtacacgaagacatctagtaatacttaatgttgtaattcattgaacagccagaaacataaaaaggacaggcagtttatataaagggaaattcataagataaataaactggaacgattcaaaaaacataattttttcaacgaagcatacacatgtgttgcaaaatatgtgtgcatccgtcataccaaaagacttgagagtagagccgagtagagtagcttaaaccttagcagctttgcttctagtagaatatagcaatctccctggcgtaccagtagaaaaaacaaaccctgcagccatgatggaacgtgcattgccctacgcaactcggcgggtggacaaacctccaagacctttcccagcggcgagcattttcagtgtgaagctggctgatgtgatacatcaccatctctgcaaccgcgtggccagcttcaagggtgggtgtcatttcccagaacttttcgctgatcgggaggaaatccaagtgattaccggtacacgtaaggaacaaaccggttgcgaagcaagcaaagggatcagataaagcgaccgttgtcatgactgaaaggccctgagctactttacgaagttgctcgcttggcgaacaccttcaaggtaaaccgcctggatggatccacgttctacaagcagctcgaagtatggccggaaggtagactccggttggagtaacgacggccacgtcatgaattcatcgattgcaagggtgttgatgttataactgtagactaagttccttagcgtctctatgggagtctggctgacggggaggtagttgacaagtatgcttatggggtttggcaattggattcctaggtaacttttaatttaaacaaactactgtgtacctctcataatcgcgccgtgtacgtctataaaatactcattacgttttctgatagaaggttgagttgatgtctgtttgtattgcatataagtggaacaatatggcttcatgtatagtgctatattaggggtcaacgcatttactaacaatcttttcaaataaacattaacttacttaatttatctgccaaatcaattgagtacgttgctcgggaaccgtgtacgtctaatagagatattaatgagagtgtgatggaggtcacttctagagtgtatttgacaacgagtaattaatatggagcgaaatcttctagatatgggttatacgacgtcaaatcaaatttcctttcgtcttcatttacaaacttccattactgataatcaacgtaaaaagctcacatattgttgcatggaaaacttataaatatgacaggatcgtggcgaatgtgagctctacaggatctggctaatccgtttagcacacaaccagatgtaacattggttgcaaagattattgaagagtctcgatctcatgtaacacatctccgcgcattcaggagtgcttacgtcaccacattccgggtacaaaaaactgttagcgtatgtgtattttaaagtattaccatatttctttatatcttctagcacctcctcacaaatgtcacgtgcctcctccgattccaaagcataatggttgcttccgaagagccgaaggtagacaccacccatgtgagcattaccagcacatatgtaaagaattgcgcatgcaagggttgcagcggcgttccttggggcgattcgctctaagtgtaggatagctccctgaatgtcagactcatgtgtaacgagacgcagtccttcatggtaaatagccgtggggttaccagcttgtaagcaccgtttgaagaatggtctatagcgaccttcggagttgatgtcatttggatcgtggcctgccgcgtagaagtcatcgggatcgtcgcacatgctgaaaatgtttgcatctttgaggacatccggacggtagacaatgtctcttccacgaggaccggatttcaacataggtccgaggtaccaccaacatttgtcagccattttcttggctatcttcgcaagcaaatcatcatcaggaatatttgggtttgtcatatttaggtgtaaggtggttcaacaaaatgaaattccaacacttaaataagcatcattgaagatatggttgggtaagttatggttgtatttattgcaaaggtattaagtgatgatgtgtcttcatattgtcaaatcaacgtaatagtattccatatataatttgttattgttgttatgagcaacctctttttaataacagcttaaaactagacgtgtacgttttagtgtgcgttttagtgtacgtccacatttacatttctacatttgcccaacaaacagtgtacgttgtagtgtacgttttagtgtacgtccacatttatatttctacatttacccaacaaacagtgtacgctgtagtgtactatcagtgtacgtccattcataaatataaccatttatgagacaaaccaaagacctcatatgtttgcatgtgttattttttagtgtacgttagagttgatatctcatgctagtgtacgtccatatctagttttccgagacaaaccaaaaacctttaagtattatttggtagatgcacgtgtacgtagttgtggacgcttagattttaatatccaaatttacatttactgcgggaactaaatatcatatgcgaatttggctgaaaaatattcaacttgagaaacataacacaccttgcaaatttcttaagcaataatataatttcaacataaacataaacaacatagtagaagccttatcataatttgaaacatgacatagcggataacataaacaaacatataaagtagaatggaataactatagcatttgactaacacgcctggcacacgacgagaggtaacagcggttgcaaacgttttggaaagctcctgataccatgtaacaatgtaaggcgcaaggaggcatactaattccatggctggtaggataagagaacgtaggaccatatgtattgctgtatggagggtcaaacttctttatttcctcgatgaactcatcacccaaaactcgagtggcaaccgagtccaatggataatggttgcgggtgaatagctgtagaaacaagccgcccatataatcataccaagcacatatgaatacaatggcgcatgcaagtgttgcatttgctcgtactggagcatgacgctgtaagagcctgatggctccattgatgtttcgttcatgcgttagaacacgaataccttcgtaatacacggtcgtgggattattagctgcaaaacaccgcaagaaaaatggtcgatgtcggccttcatcagcggatccggagggattgtggccccctccagcttggaagtcatcgggcgagttacacaaggtgagaatattgacatctttgaggacatccggacggtagacaatgtctcttccacgagtgccggatcgtaccagtggaccaaggtcggaccagcattggtcagccaggttcttagctatcttcgagagtaaatcgtcgggaagagtcgggttaaccatgtttgaaatgagatagtcagagatcgtcagtaatttcttcactttaataaccactactgtgaatttggttggggcaattacggttgaaatgaatgtcatacttgtgttggtaagcgttggctgtcaaatcaatttatcacttgagttatgttataaagttaatatgcagtgtacgagacatatagatatgtacgtacacatttacattatgtaattagaagtgaacgatgtgtacgacaatatgatagaggacactaaattaacttctgacaatctccaaattaaatgtagttgcaatcatatatctaagataggtttgttcataataattggttgcaaagaaccagaatattgttcttggacgattaaagcaagtgcacagtaccgacctcccgcttgccgtgctcgtagatgtcaaccgagtatttctgacggtagaagaccatatctgcttctcgaatggttgtcaattccgaagaagggtgtccaaacgcaagcaactccaagaacttcatcgtgtatggcccgcaatctcctgtagttgggttttgagcaacggtaggacaacgcacatactcaaaaggttcaactgagtacggagaaatcaatacatcctggcacatcgctctgactaagtacgacatcatttcgcaaataggagtcattctcgccttcacagccgactcccgcgtgtgcgatattaaagcgtcatacacagttattagccgttcattaaggttgattcccaaagcaacccaatgttcactcttccagttcatcggagcatacacaacatcgacatccttcagccacttcatattgggttcacggtttatgtgaactccattagcaatgtcggacagtaatttaccccatttgaacccgttcttattaatacacttcttgaagtcgcccacccgcttggtaagtagatgcgtcagcatcatgtccaatacaatacatctgtttgctatcatctgttccccgttcttgtgacacatcaacattgccatcatttctaaatgctgaaatgttcaaaaaatatatcagtgtacgtacacttccacgaaaaatttaatcatctatgtacaatttataacaaggaatgtacgtatataaatgcaacgtaccgaactttcgacccattcaccaggtgttagaaggttcgcaaaaaactcgttgggcactttgcgaaacccgaaaaagagtgtgaatcctgtaaatccagaaaaatatttgataacaaccttaagacttggaaaaatgatgattgagatattaaataatctattttaatataatgtacttacatagagggtcctttaatgatattgctgaattcctctacttttgaagggtcaaccatgtccagggggttgtatgagacatttccagccctgataacaacctctatctgttgagttggtacatcgggcaccaagactgtttttgccttaaaaccatgaggatgtgcatcatcctgttcatagacaagttgcttcttcactttttttgggacctttggggacgattttttttcttcttttgcttcgacagcagcagcattgtctgattcatcctattaacaaatatgattgtcaacaacagtttcatacgtttttctatgtttaaaataggtacatacattatttttaggaatatcggtcttgtctgcttcatctgaccctgggttaggatcctcagttcctacagacccctcgacaatacccggctcttccatgactacctgtgcaagttaacgtacacaaatctatataatgtacacatataatcctatgcatgctattccgaaaataggaattgaaacacacaaattgttacctccacatcagtagctgcagccaaatcaccaacggctttggtatccaactcccgtatgacctgcataatataaattttatacatttgaacagtaaatagtacattttatttgttgcaagagttagcttacattgttaactacttgaaatggtgacgggggatcactgtgagtcttctcaggtatttcaacttccatccctgtcactaatttggattctcctgccgcctcaacctgtagaatttatcatcggaaagaaactttctactaatgtatgaaacaatatatatgtacacagaacatagtgacaaaaatgtacgtacacttgtgctaggtacgtgagttgtatctccatcagaaggctcataagtttcttctgagtcgctgccattagcttcagtcgatgcactggcatctcttgcttctttctgaaacaaaaataatttgcaaagtcttatgggcgtacacatatggaaaaagaacaagtgactaacacatacgtgtgcagatgttgaaggtaaacctgatggattgtctaccatctctatgtcagcatcagctatttcatcggcccctgtatgggtaccaactaagccaggttcggcaacatcctttggtccattatcctgaaacataggctaccatagagttaagcgttagataagtggagaaattaatgtaatatatatgcatatagtcatggaaatctgtatataacgattaccagaagatctacctctgaaactattgcagacacattagatggaacttcttccatctcggtgtcaacagtagcttcttccacaggcctctcttcctgtgtaacatagacagtcccagacattgaacctaagaagacagtcttaccaacaacaacatttcctctatcctgaaacatagtttaactaacttcttaagcgaatatgtacgtacaccatttaaacagattgtttagagtattagtagacgacataccagatgggattgtgtggatccagcataaggaactattaaaaatccagtgtctaatatctcttcttcagcggccgaagaatccaatccatcatttgcagtaaaatcactttcattattagcgccataatgtatcgaagcagacagtacagttatacatatggattataaaatatttagcaatgtacgtacatgacttacctgttcatcaatgaatccttgcatatcttccttattggaatcaggtagctcagtagtgtcaacagcaaaagaaacatttttcttcggctttgaaggttttcttcttccgccgacagcagtggtatgtactccagggacatccaaatcttcctctttggaattacagccaacagaaagtgcaggagtgtccacatcatgagaaacacgagtcagccttgaagactttctcgttccagtgcttccttttgtagacatccttctcgatggcttcttcgtagtaaccggtgccttatccatagaagtaggtggttcccgcgaatcatgggaaggtatggtttgttctgtccttttgccttttggatcaagggcagcacgtatctggtcacggacaaagtctttcatatcttcatgcatttgatacatttggtcttccagctccttgaaagacctcctcatttcaacaataaacctctcaggcacaggctctccaaaacaatcctcagcgttctcttctttatcacagtccatttcagatttctgttttttcatagcaggttctttagggctcgggcccggtgcatttcgtttcctcttaacatctacaatagaccagttgctgctattaattggttttcttctgggtgcaataccaaaaaaatttgtaaacaacctttatacttatacttacctgtctcttctagttgtggtgggcgcaactgctttggtactctagcatagcctccaacccattcatcctcctgccactgaggcccatctattaacagtgcctcaatgtaatcaacccttggatcatcaacttcatcatcccatgaaagagatggaggacaaacattatcagctggtttcacaatatagttgacctcaacctacacaaataagtatgttaaccatagataatgtacatttacttattatgtacgtacatacacaatttaacacacctcatcagcagcctcacactccaaaatgcgagatgtccggattgctcgcagagaggcaagacgatggatagaccactcagcaaatgtcctgttaggtacatcatcaggtcctagcttagaattgatgggattgtttcgaaagctaaaagctggagagctaatgggaagccatggagtgcataagaccctacaagtaaaccccttattagttgttgagcatcgtaaggagtttggaaatttgttatcctccccaaagtacgggtaaaggacacccttccccatgggtatttgcagaagaactccaggttcttagtcatctcgacagtcttcgaagtaggcctgttggggttactgtgggccgctaccacaccgtcaaccaaaataataagagatagtgccagttgctttcacccctccatgctttcctcctcctgcagccagctcaccaaatcagcaattgttggaatcgtgtccccaaacctctcatcaaacagagtcttccaaacactctcacactcaggtttcacactgataacatcatcaacgtctttcttcttgggatacttcccacattccagcccagttaggataataaattctcttaatccaaatctaattggatgaccgccgaatacaatccacatctcattcaccttctttgtcactaactgacggcatattagtccaaggacaagcttagcattgaaagatgccttgtttttgggtattttaaaaagttccccaaatggagaatcgagaagaaactgcatctctggtttcccctttagtacatttgctatgtcaaaaatgtacttcagtttagagtacgcgttcatcttcgtctcggaaggataccggtctagagcaaagagtcttggtggtaactcttcaactgtaagatcttcagtcggagcaacacttggactacctgcaattaaaagtcatatattgttaagcaaaccgaagtagtgtacgtacacagacattttccagattataactcaaaatcatatttttggcggaaacagagatttccaattctacttctcaatttttcatcctaaagatatgctaaattccgacaaattctaaccctttaatcaaacaagctttacaattctgatacacccaaagacaacaaacggaaaattagagattctaacccagttcctccgttgcctttgtcgcagagcgttttctccgcggggaaactcttaatacccgcttctccttccctggaccatgctgcttcctcgggacttcgtcgttagctttattcccagccatagctaaagatgctatctcgccggaggttcaaattttgccggaataaacagtaactttctcttggcttcgctgggaaaaacattaactttcacttccccggatgtgggagttctgtggctcaattcaactacccaacaattcgaagttatgttgaattttgaagcaatggatacttaatttcgtttcgctttctgattctctctcaaatctctccgttactctcttctctttatcgttttctcgggtttcttcgtttcagttttttttttttgtctttttcaaaactgaaccgcatcaactaaaccgaaaccaactgctgtagggtttggtttacgccgtcaactcaaccgatacgaactgctgcacggtttggtttgtgccattattaagttttcccagggtaatttggtccgaaattgaatgaaaagacaaaacgtgaaaaccagttctcactttgacaaacggttagagcaaatcttttttcgtccacttttgtgaaaatttcttcttaaacatagacaaaaatgcagtagcgtattgttatttgtgaaaaaaacatgtttttttgtcaaccaataataattaagttcaaaagagttatctttgagaaatattgtttacataggtaatatgatgcggttcggtacgaattttttgtactaaagaatctgatttaacatttgcactacgaaaaattaaagataaagaaaaacttgtaatttttttcttatcgctctaaaagaacatgtcatttaataaaaaaaaatcatattatacttaaagaaaagcgtagaaaaataaagtgttttaacattaaaatcatgttttaaaaacaaattacatgtgatcttaataaataacatgtaatacaaaaaagtaacattttaaagagagagatattctgctattacgtgtaattcaaagaaataacatgttacggaagaaagtgacaaagaattatagaaaaagacatgacaacgaaaaatttaagaaagattgaattccgaccaaagaaataaagagattatctacaaaatgagggagagaaaacccatcaatatgaagaacacttggcagcctagatttatcaagagagagattggcagcatacctataatttatctaagagtggtaaaaacgagagagaaatcaaacaaagaagaaagagaaagacaaaggttaaaaagaagaaaaagggctgacgtggcaggagacaaaaaaaggcgattagttttttttgcgtaccaagcaagaatgctgcagccgacagcctctccagtcacttccggtgaggtttcggtgtcggccattgatttggctaacagtttaccgattctagagagtcaggaggagaaatctgatgatacgaagaagggtgagcaaggggttttggtgtcggatacaagtgagacagtttcagaccagcagatctcgttaggtctagatgctactccaacagttgttgaggtggtgtctccaccagttaagaaatcatggctcaacgctgcaaaaaaacatatcttcacaaaacaaaagtttgtggtagatgcagttgatggtaaagaaagagtggttgttccgaaagaggttttttgcaggtgcaaaacctctctgggaggattttttggttggtcgattccttagtacgaaggccccgcatgtgggaaagattcacatgattgtgaataaaatttggagataatttaaacttaattgatgtgtatgaagtaaacgcaacaacagtcaaatttcgcataaggaatgaggcaatgaggaggagagtgctgaatagaagaatgtggaacattatggacattccgatggtgctctcgaagtggacgccttttcaagaagattctcaaccagctatgaaatccattcagcttttggttactctcacagatgttcccccgtcaatgttcactgataaaggtttggagttcttggctagtgcagtgggtaagccaatacggttacatccaaaaacggaagcttgtgtgagttttgatgaagcacaaatcttaatagaagcagacctaacaaaagatctacctagagagtacgtattcacgggtgaggaagaaggagagctcgatgctgttattacatattcatatccttggctgcctccgagatttaatggatgtggtaaatggggtcatcttaaagaaacatgtttatctattgagaaaaccagcacggggaatagtgattttgtaaccattcccgcagttgcttcagaaccagttcagccatcctctccaattacgggaaaagctaaggaagttgttcatgtaactttggatgaggtgcctaagattcaatctaacgctccgggggaagtagaggtagagagaggagaggatgaaggatggatcactcctaagactacgcttagccccgggaaaagtcatgtaggattgaagtttggagaagtttctattttatcaaactcatactttgtacttcgtggcgcagaggatataggggaggaaatatctaaagagatggaacctcacgagcctgaggagaagtctaaacaggcggatactcaaacacaagaggtggaaaataaggaaaaaaaaactcagtggtaaggtcacgggttttagagctgccacctcgggcatctttaccccgtggatcaaagtctgcacataaagtgctctccaatccttctactccttcaactaggcacactcctagtggtcagagtttagggctccctccaaagcatcgctaaatgacgggtttcttcttgaatgtcagtggtttaaacgaatctgcaaagcatccaatcataaagaaatgggttcaagaacaaaattttcaatttggttgtttacttgaaacacgggtccaggagaataagatgcaggagctgagtgaaaagttgtttccaggatggtcggttttaacaaattatgaatttaataggagaggcaggatttgggttctttggaaaagtaacgtgaggcttacccctttctacaaaagtggtcaactcataacttgttcggttaagttagaagatcaactagaggaattcttctgctcctttgtttatgcttcaaattttgtggaagaacggaaaaacttatgggcagaactacaagaccacaaggactctccaataattagtagtaagccatggttaatttttggagatttcaacgtgaccctcgatatgaaagaacactcgaactgtgatagtaatccggtggtgacgagtggaatgagagattttcaacaaatgattcgctcatgtgatctttcagacatggcttcccatggtccgttatacacttggtgtaataaaaaagaacaagatctcatactaaagaagttggatagagtgatggtgaacgatatttgggctcagtcgttttcgcaggcgtacaatgtattcgaagcaggggggtgttcggatcatctacgctgtaggataatgcttaatgatgcagccgaacgaagtgtaaaaggcccaaaaccttttaagtttgtcaacgcgatcatagaaatggaggattttaagccgatggtgaaagaacattggaacaaaacagaaccactcttcatgtccacttcaactctgtttcgtttttcaaaaaagctaaagatcttaaagccagggatttggaaattggctaaagaaagattgggaaatctggtaacaaagtcaaaggaggcttatgacattctctgtaaaaagcaggaacaacacgcaaacaatccttccccacaaagtatggaagaagaaacagaggtctataacagatgggtaaaggttgcaggtctagaagaaaagttcctgaaacagaaggctaagcttcactggttgtaggttggggaccagaataataaagcttaccatagagcgatcatgacgagagcggctcaaaacacaatccgtgagattaaaaggccagatggtagtatcacgtctgaaaaggaggaaattaaagtagaagctgagagattttttcgagaatttctccaactcataccaaatgattatgcgagctagaaactttgatgacatttcgttgttcagaggaggataaaggtatgcttactactgaggttacaaaggaggaaatcaagagggttgttttctcaatgccaaaagataaatcactcgggccagatggctacagaactgaattctacaaggcaacttgggatatcattggtgaggagtttgtcttagcaataaaatctttttttgaaaagggtttcttaccgaaaggagtaaactcaacaattctggctcttattcccaagaagctggaggaaatagaaatgaaagattaccgaccaatctcttgctgcaatgtgatctataaagtcatatcgaaaatcatagccaataggctcaaacggttgctaccaaacttcattgcgggcaatcaatctgctttcgttcaagataggcttttgctagagaacttgctcctcacgacagagctagtgaaggactaccacaaagattcgatatcgggtcgttgtgcaataaaaatcgacatttaaggctttcgattcagttcaatggtcttttctcaagaacgttctctctgtcatggattttcccccataatttattcattggatcatgctctgtgttactacggcctctttttcggtccaggttaatggtgaactagcagactacttcaaaagctcccgaggattgcgtcaaggatgctctctctctccttacctctttgttataagtatggatgttctctctcgcatgcttcaaaggcggctgatgcaagaaaattcggctaccatcctaaatgtaaaaacattgggctcacccaccttagctttgcggacgatctcatggtgttatcagatggtaagactcgatctattgaaggaatagtgtaagtgtttgacgagtttgctaaaaaatctggattgcgtataagtatggagaagtcaactatatacatggcgggtaaccttggttcacatcagcgagaaattcaggaaaagtttcactttgaggttggtcaactcccagtaagatacttgggtctaccattgcttactaagcggctcactgctacagattatgctcctctgttagaacaacttaagaggaaaattgggtcctggactcataggtacctctctaacgctgggagactcaatctcatatcttcggtcctctggagtatctgcaacttttggctcttcgctttcaggttaccacgggaatgcatacgagacattgacaaactctgctcttcttttctctggtctggtcaagatttaaacccgcgtaaagctaaagtatcctgggatgatgtttgtaaacccaagaaagaagggggtttagggttaaggtctttgaaggaggcaaatgacgtttgttgtcttaaagtggtctggaaaattgtctctcatggtaattcgctctgggtcaaatggatagaaaagtttctattaaagaacgaaacattttggtttgtaaaggagaacacaacattgggctcatggatgtggagaaagcttattaaattcagggagaaggcaaaaaacttttgtaaggtcgaagtgaacaaaggtaactgcacttcattctggtatgatgattggtcaaacatgggtcaaatggttgagaaagttggggatcgaggaatgattgatatgggaattcagcggcaaatgacggtggtggaagcatgggataaacgccgacgtcgcaggcatagagctgaaattctaaatcaaatggaagaagcactagaaaaccaaaaacaaggagaagcgacatagatgacaaggttctatggcagggaaaaaacgatgtctacaaagcgagtttctccacaaaagaaacttggcaccatattcgttcaaaggcttctgaggtaaactggtatcgcaaaatctggtttcatcataataccccgaaacaatatttttgcgtctggctcgcagctcgtaatcgtctctctacgggagataaaatgcaccaatggaacaatggcgtctcggtaacatgcattttctgcaacaatgatctagaaacccgggatcatctcttctttgcctgcagctttgtctcacgcatttggaaagacctagcggcaaatatattcaagacaagatacacttcgaactggcacacgctacttaacacgatttctgcaccttggagtgacagaacagagagctttgtagtgcgatatgtcttccaaaccgtggtctacactatttggcgtgaacggaatagaagaaaacatggagagaagccaacctcagcacctttgttaatcaaatgggtcgacagtcaagtccggaataggctatcaacaattcgaagcagtggtgatagtcgctataacaaggggctacaactctcgtttcagtctcaatgttcaatataaacctcatttgatgtttaggttttcttcttagctttcttttttagcctcttttcagctaacgttgcactttgttgtaccaaagacaccttttctttttgaatataatttaacattacattcaaaaaaaaaacaaaaaaaaacaaaggttttattagatcatttcatctaccctcttaacaaattaaatcactataactcatgctaagttacttaattcttttcatttctttggataatttctacatattctcaataaaaaacagaaaccaagtaatgaaattttatagtttttcttttgtatacgaaattcaacaaaaactaaggaagtacctttttgctattgtctttgaaaatttgtgaaaaaaatacaacaagaatatacgtaacaaacataaatgaaaactaacaaaatagaaaataacatgggataagaggggttaaattctgattacaaattatataagtctggaaattacaaatttattttaatggttcatatggtttcaaaaattaagagtttatagctttaaatacgaaagaagatgaacaattgatagttgaatacacaagtcggatggtgatgcgaaggtagaggtttgatttttaagttctaaaggcatttttgttgggggtatataattaagagaattttagtttataatttgttgggggtatataattttatcatgacacatcaacatttaaatggttaagttttttcttaaatagtcaaattcaaatatctaaataattaaattatatattaaactatcaatattaattagtttaggacccaatgatttaaaaaagtttgaatccaaacatactttatcacatgaacatagattattgggaaaaatgtcaaaaaaagcttcaacttttaaatttgggatgaaaaaagcatgaactttgaaaatgtcattttaatcatgaagttttcgttgacttctcaataaaatagcaaagtttcgttgactggaccgtttaagatatgccgttaaatttccgttaacagaacgatcacagagttaactttctgttagaaacccaaaacgacgtcgttttaaaattaaaaataaaacagaaaaatggctatagcgtagactcgaaccgctacgcagaggaactcaagccaaacttccattttgatataatgaaaaacaaaagtaaatatatacttaaaatatcatcttcttcatagttcttcttctcattcgtctcctccattcattcctctagagtcggagttctctctccgtaatctagatccgtcgtggtttgagcattaaccagctcctgggtgttcaccttctcagaatttttaataattcattaatttgggtttgaaaaataattgaattgagaataaaattcatattgatttggtgagtctagagtaggagatccagcggaatctcgatccataagatagtaatttcaagctcatgttcaatttttgatgaagaaaacacagatttgaatagcaaacctaacaatcaacattgaaactgaaatgtgattgggttttacgaacgtgagaaaacaatggagttttcgtagtttcaatttagtttgatagatatttgatataaactttgtttgctgaacctagacaataattttactgtggcaaattggtttaaaagcttgtaaggagtttcacatgtcacatgaacgagcataggctattgccattttttgttttatttttaattttaaaacgacgtcgttttaggtttctaacggaaagttaactctgtgattattccgttaacggaaatttaacggcatgtcttaaacggcccagtcaacgaaacttacctattttattgagaaatcaacaaacacttcatgattaaaatgacattttaaaagttcatgcttttttcatcccaaatttgaaagttgaggctttttttgacattttccctttgttacaacacaaacttaaaaataaaacataagcaatagagtacaaaccaatctcttatctttgtaatgactttttcaaccctagtaattactatatcttaattgttccctttatacagcctgaggaatcattgatatatatgcatcattttacgacttttagtgacccggctcagtactctgtggctgagtttgaacagcctgaccagcataagcacaacacctgaagcagccaccgtagtagcctctgtagcagcaaccatagcgacaatatcctcctcctcggtttccatatcctccaccgcggtttccatatcctccatcacggtttctatatccaccaccacggtttccatatcctccaccagggtttcctccataccctcctcccgggaaccctccataccctcctcctggaaacccgccaaactgctccgtttgctttacttcgtctctttctgttactcaaaatgaatatatattagtaattgtgcttaatgatatattcagatattgtcactactttataaagtatttgtaataaacatgagcgattcgtgattagtatgagtttttttgtaattaaagcaggccaaattattaagggttgtgaataaggaggattaggtctttgtacaataaaccatactttgaaagtgatctatagaataacatggtcgttatgttacaaatatacaacgatctcgagtaatttataactttatgggaacaaaaataaaactagtctgaattttattatgtaccattgtttttctgctctgccgatttctcagcgaggtctctggctaccacctcagaagctataagaagaacaacaatgagacttaaaaaaagcaatgcttttgaagccatcgtaggcgacgatctcttaaaatactatttttgttatatataatgtattcaaaatttatatggaagaaagaactggtgagtatagtgtcccatgcaaaacctctatttatagatcacaaggtagagagtacgtgcaagtaaatgctactttgcaaaacgagtggataagtgcaaataggtcatcacgagggcccttgtacggttggttgttggattggttgtaaattgttgcaccctgataattaaagttcttgctgttttttaatgaccttttcctattaatttaggactacttcttttaatacttttaagtttattttgggggtgaaatgttaaagatgactcgatttgcaaaataaccatgtccaaacaaaatctagcaaaagtaactttaaccacaaaaatatataaaacagaaagagcgaattaaaaatggttgtaggaattacaattcttatggtgactgtaaaacaatatagttcaattatagatataattactccaacttaacatgctacgatagcaagtttataaggagctagccatactctacatggttcttgtggaagatcgactagtggataatctatccgtcctgcaaagtcttgactacatatacaaacttggttgaggtgaagtttataaatatcagcttgaacattcataatggagatagaatactggtgacataaactaaatacctaaatgtaaaagtaaatacatgccatactagttctgccattctttacttattatatttctgacattttgtttatgctttgtatatttcagtttaattatacgtctttttccatgggttttaatgttttgtatagagttttgcaggagacacgcctcttcttgtaaactgagaacaatctttctggtaatcgaactcgaatactaagagttaagaataagatagtacagttttgcttctcttgaatttattggacttatctctgctgttgtatatttttacatgagaaaaagatatttattcatcagaaaataaaatacaaaaggaatattaaaaagtttacatatccaaaatgagaatatttgggataagctatatttacttatactaattgtcatttataagaataataaatgtagaatatattttaatttttaactaaggaataaatttgtgaacaataacaagactaatgagtaaaacaatagagatatggtactggttagaattgacaaattcaaaataaagaattttcaccataattattgtctttttattctaggaattggcagagtgggctgggccttcgatgttttagccatttaggctaaactggacgaaaatacctttcaacaacaactgctcagagactgttcactttcagttgctttgtttcttttggttacggttttgtttttaaaacttaaaattaaatagcaaaaattttaagtggcggaaacttaatagaattccgattgaggctctgttcgagttcgagttgttgtttaagtggcgaaaattttgatcgagttcgtgttaaagggtctaacaattaaaggattttttgatttctcgatttactgtttttagaagaactcaaaagacggagatgaagaagaaaagtcggcgaggaatttcggaagatactgtgtcatcggcggcgacgacaagtatggctctaacttttatttcaaaattcgttagggtatctggtaatatgaaatctagggtaattttagacatttcaaatcagaaatcttcaattcatcaatgggtttaaagtgttttccgccatacaattgagatttaaaagatcagttgatagttgaaactgacatgactgcatggaagaaattagctttggcactcataattattgtggatggggtgctaacttgtgattcgtctcctcccatgagaccaaaatttatgacagttgagctgatgaagaacctggatttcttctgcaaatatccctaggaaggacgtcattcctccttacattggatcttatcgcaagtttcaaagaagagtctgatgttgaaaaactcttgattggttgcaagcaacactcttacgcattccatcgcttcccactagcactccaactctttgccttccaaattatctcgtccattgctatttcgtaccttctgaagaagataacaacgtctttacgcagaggtctatcaataatcttgtcaaactgcgtccgatcaagacatccagcatattgatgcgcaagtctgttgaaaaggtttgtacagtagttgttgtataaatatgatactttaatgctacaagtaaccaaataaatttttattaactcttgctcatgtaccaccatcgtttagaatattacaaatttagtcttcaatataattaaacataaatgcaaactttatttttagtctcagctcttaaccaatcttccagtctgattaaatggcattcaactactcctccctacacttagcgactgtttttattcgttgggaggcactgaaacctaaacaccgagtcagtgcaagcttgtgagacacaaaagggtcaaatttctgagcctcaagtaacctgacacaataagtttccaatatcttttggcacatcaaatgtgagataatttatggtactttcgtatatttagttaactttggaagtataggtacgtgtgtgcaaaacctcgatagagtctctaggtgtttttcttcgacctagaaagtatgataatggaaaactcttacacaaaaacttaagataatagtgtaaacaacaaacaagattttattatgcaaacatctcagatcacaacttaaacacagacattacatgaaactttattcccattacttataaggcacttcattacaaacgcaccataattaattaacctatagtcatatacacgtaagtgtatatctaggtacaatcatgcatggtggtcaacttattatattgtttaatttagtgaccaggctgagtctgaacagcttctccagcatacgaacaacaccttgaacagccatggtaacctctgtagcaacagccatagcgacagtaaccatgtcttcctccgtgtcctcctccattgtatcctcctcctccgttgtaacctcctccgttgtgacctcctcctccgttgtaacctcctcctccgttgtagcctccattgccgccgtgaccgccattatattgatcaggttgcacggtttccccactctctgacttcactgtacctatccaaaacaacacataatttcataagatattactctcccaaatttcaaaactatttcttctcttaaaccaactatgaaaaatacgaatgtaaattaattttgacttttaaaaataatattgacaacattgaaaatactctatataaaacatgctataaaaatagttgagatggtctcttacatataataaggtttcaacattaatatttacgtaccggatgcagcggcaacttctgtgacgacgagaagaactgcaaatagaccaaacagaactaaagccttggaagccattcttatcaactgcttaaacttctctttttatgcaaaacacaactgaatcaagtgatggataaaatgttactcaaaacattcactatttatagagaatgaagagagagttaaataaagtaatcagtagtccactagagtgaatgtatttttttagtcacagtaaatacaaagaggtaaggagataagtaccaaagtatatgtacacgtcgattaactcggttcccttatggttggtggttggattcacggtaaatatatttgacactacataaatggtaactccactagtctttttatataaactctattaaccttttaaactcaacacttgttggattcacgttaaataaatttgcaactccatcaatgataaactccactagtcttttataaaaactctattaacttcttaaactcaatgcattcacacacatatagacatctagattcgttggctaaaaaacaaaaacaaaaatatattagaattccattattggactggaacactgcaattaaaataggcgataaataaaataattttctagttttaatactgtgtcaacagaatttgtatttgataactgtatcaaaaactattatatacagataaaatatcaaatttagcgaaattggataaaaatacaaaattatcaaatttataaattatttcatacaaaaatatatactaatataaatttgtttcgtactcactttcgaacacatcaataaacacattttgacactttcgatctctccaattaaaatctgaactcatgttgtttcaaagaagattttaaccccgaactcatgtgcgttttaagaaaaatataacgagcccactgataaagaatgattaatcacttccaagaggttccacaacattttatgaaatgaatatgataacattttaataactatcgtggcctgaacgcaggcaatgtcattaacgtgattttgattgttttcgtattcgtgaaagtgattgtggaaaatgacgtaactataagttttaaagatctctttcatacacacattcatgtttacgtccatgtccatgcaactgattgctatcaaactatgtttcgtccttttttccgtattattaccaaactatttttaattaatcaagcggtcgagactcgttgtctagtgtttatgttgaataatgttttggataacgggatttatttgttgatttctcgggattttgtgttgatctctgattttcttatggattacaagattcttctttggatcaaattcatttaccttttatttttttgttttgaaataatgttaaattatattcaaaagaaaaccataatatttttagcacttgtgcaacgtttagcaaatatgaaagctgagtcgagagtgatcagtttctggtcttgaaccagtcgtgcatgcccttgttgtatcttcgatctcccgtacgttaaatggtggtgagttggttgcggacttgcttatctatccaagttatcaagtgtgacggggcgtttggtgtttctccgtgacgacgccaaaagaaaaaaacaaacacacacgaaagtctccgattagtaaagagtcttgttttgccagtcctcaactttttattttgttattataagggcatctttaatggttatcttcaaatatttcttcaaaattaaagtttcttcaaaattaaagaaaaaaaaagaagaaagactttttcaatggtttccttcattttctacttcaaaaagaatattcttaaatatattctatctctattttattattaattatgaatattaccttttactatataaacttatgaactttaacctatttattttataataaggaaataattcaataatttatataaaatacattattataaagaaaatcacattacatataattaattaaaacatatatttatggtataattgtagacatatatgttagtagtatatgttatgttattataagtttttaatctatgttatgtctttaatatttaatgtcagcattaattatgtattttaagttttatgttgggtatgttatttgttttttcatttaatatttttgcattttagtttgattggactaaaataaaataaataatttttttagtataaaataaatacttattataatttgaaagattattttgtaaataataaagttcatattcaaagtgaattgtatatcttcaaatataaagatacactattcaatttttcattttgaagataaaaataaaacattagaaagggtctaagaaaaccaagaaattatattttcctttttgaaaagtctttttcatatcaatagtacagataaatatctcattattattggccggtggggtatgcggcgtgccggtgccaagtggacgactaacgattaacatgaataccggtgatgttactgacactatgagttttaatagctttgggcacatcaaatcttctaagatattttttctggcactttcatatatttagtgaagtttgaaatgttggtgacaaatcctcaatagagtctctaggtgtctggtcttttcatttatgaaatgtaattcctcagccagagacatatttacatctatttttctcgcccaccctgagcgtatgtataatgatataacactgttacaaaaaaacgaaagagattaacataaactacaaacgattttattatgcaaacagcaagtattacaactcaaaccacataaaacattacataatcaaactttattcccatagttctcttcttaatctatagtgcctcaaaaacttgaggcagttcattacaaacgcaccatggtttacttaaaatcatacatacataatgcaatacatgcatggtggtgattggttaatatattgttttagtgaccgggctgagtctgaacagcttctccggcatacgagcagcatcttgagcagccgttgtaacctctgtagcagcagccgtggcggcagtaacttcccccacttccccctcctccttgtcgcccaccgcctccttggtatcgtcctcctcctccttggtaccgtcctcctcctccttggtatcttcctcctcctccttggtaattacctcctcctccttggtaattacctcctcctccttggtaattaccccctcctccctggtaacctcctccgttattgtaatttcctccattgtcaccgtagccacgttgatcaggtttcacagtttccttactctctgaattcactgtggctgtccaaaaacaacacatattttaaacataatgtttagttcgtgtaaacgtacatgcctctccacgatactaaaatctgtccgaatctattagagtgttttcaaaagatttataacatcatatactgaagattatcaaaatattggcacaaaacatttgaatattttgagattaggtataatgaagattagacatcctactaaaatatataaaatcattttaagtaccagaagatgccgcggctacttctgagacgacgagaagaacagcaaagagacccaacagaaccaaagccttggaagccattttttttgtttcaaatgcttaaaactctcttattatggagaaacaagtgatgcataaaatgttaccatgcatggcctctatttaaagaaaacgaggaggagggaatgagaaaagtcaaataacttatccgtaatccaataaagagaaaaggaacttatcacaattaaaacaaagtagaaaagtctaagtatatatgagtttaattgcgtcggtccccttattctggttggatgttggacgcattgtaaataatttgaaactccataaatggcaaacccactagtcttttggatatttcgataaatttattaaacaatattgatatgcaaaaacttcattattggattatcattgttgttgtttttttggacagaaaagaaaagtcgtccactcttggtacttgttatggatacgaccctttttttagtcgacatattttaaacctatgtaaagtgatactgatcaataaatagatcatcaaagggctacacttacggacggctttaaaaagtggtgcaaatttacaggacctaaaatactgaaatattttcagtggatgcaaaatatatttcttatgaaaattaaataaatataatactataaataacaaaaaaaaaattaggttttaatccgcattaaaattcgaaaaaactgtttcatatattttaattaatgaaattagtttaattcaacataaaataatattggtggttttgacaaattaataaaatgaagattttaactttttcaaagcgttggctaatgatgtattttaattattattattttttgtcaaaaatattttaattttttattaatatcgattttaacccgctatgttatgtaacccgttccgcaataaaacccgtcttgtattatattaaaacccgtcaggtcatataccggatcactataccgtgtattatgcaaaatatattttttataaaaattaaataaatgtaattatactataaataacaacacaaactttcgaaaataggaataatactttgatttaagtttaagcaaaactattgcatttttaaatattagtcaaatttaaaatgattagataaatacagtagcacatgttgaacatgataaatttatcttaagaatattaaataaaattaaaattacatatattaactagaaaatacaatatttagttatcatatacatgctagaatggcttgattcatacctaatttagacattccttcaacgaaaactctccaaatcagattcgttattctctgaatgggtttatcttcctccagcgataatcaacaccgtctgtcaaattaataaattgagcgtttggaagcctcaaataccacaaatatacacataaaacggtgttaactcataggaaatcaaaagttcaccggtttttatcttcgtgcgagaaatagagagaaagaaaatccgagtttcttttgtaaagataacaatatacgcttttttttttttcttttattaaaactaaacatccaatcaaatgcatgtgaacacatgtccaccttttccattttctcaaaaatttcttcacaaaacgggttctgtcaatttttcatccaatataacctcacaaaattttcaatacaatcttccattaaaaatgttcttagtagtcgttatctccaaaatccttacaaaagtgatagtcctataaagtactatatgtttggacaacatatcatttatatattttcgtatgaaacatgttatatgtcgaaatagttttttttatcctttatttttattatttattatttgtgttaaataatttaaccgactttattaatgacaacaataattgtttttttctttttctaaaaaaatgtgttcaaatttttctcctttaagcttgtgataaggacagattgtcaatgctagtagaaaaatgtggagtctcgggtttgtttatcccacccaacacgtaaaggttagaatttagaaacgaaatgtgtattaacatttaatgctaatagtgagctgtctcgtggttagtgatgattataggcacatctaagctctcctgaaacatagaccatgcaagtgttagagtctcactcgttcaatgaattatttagttagtttcgatacaaaattcaaaggcaacaagtcaataacgatggctgaatgatgctgacaaatcgtataaaaagaaagatatgaaaaacaggaacttaaccgaaccatatgcaagcccgtgctcggaataataagtgttttattttatctattattaaagattcataaacaaagtgtacaggttcaggcctacaatccaaaaatgtaataaaaacagacacgtatgagagatgcgttaaacattccggttaatctttgtcgtcaacgattccgattctggtgaactcaatcgatgctgtaaatttcttaaacatcgatttactttgtttttcaccagattctgcatagacatagagaagtaaatcaataacagatcattcaaccctataagataaaaaggaaaaattctgattaattcacaaaattttgtttgatcgaagcaccaaaaacaactagagacggctatggcaatccaaatttgctggaaacaactcttcttctctttactttaggcgatttgcaagatcgagcttccagagatacaagtcgatagattgattttaagtgactaacacctaaaacgaatcatcaattaaaatctataaaacgaatcatcaattaaaatctataaaaaaaaactaaaaacaaatataaaagccgaccaaaactgcttatagaagctagatttgccagacagaagctagctatcttggctaacggagccacaagatgatggacaaaaactcgattcactagagacggctattcacgggaaaaatccaatcgatagaatcaaagtgtttttctctctaaaaggtatgaaagagagaagagagaaaaaacttcataataattagttaacgacgaattttcatattatatttaattatatatcagtttacaaatttcttaaataaatttttttggattttttattttagcctcatataatatttttccctttttaagtgatggtagtttgatttatataatatagatgatctgattggtattagaataaaagaagagtaaaaaacgtttttagttagattactctgaacctaacataatgagctgaaaacttttgtaatcacattcttttttctttcagcgttaatgtttaccttacataaaactagaataaaagtttacgctagtataatagacattttcttcctttattagtatgctaattatcaatttaccaatcagatccgatgtgttattattggagttgttacgaccaggcagtgcctatgaaggaaagaaagaaacattggtcttatgttgcatgaaaattctctacgcagtacgttttccgtttccaaaacgtttagaaaaaaaaaactcatagaaacatgatggaaactcacgaaaacgcgtttcctaaaattgtatgtctaaatatgtgatggaaactcacctttccattttagaaactcaaaaaatattttctttttttctttgaaaacttaataaaaaaatagtttagaaatattaagatttaattaattttgcgagacccaagttttaagatctttctctcaacgaaccagatttgaggtgttttgtatgcttttcgatggaattaatgagaataatggtctttaatacttcgttattagcaaacaattgtggcggttgattatgatccttgactccttatttgctaaggtctttaaagggaggtattatcgaaaattacatcgaatggatccaattaaatcatacttaccttcctatggatggaggactatagtatctgctcgacctctggttcaaaaaagacttattgaacgagtaggctccagagggtcaatttcagtatggaatgacccctggataccagctcaaaccccgaggccagccttaaacaatggttatattcataaccaatctcttcttttcaataattttgattgatgatcggataaacacttgggatattgacttaattcagaatattcttgatctcaaggatcttcctttggtatttatactacccataggaaaaaacaacaaaccttatataatgggttgacactttaccgaatttggaaaatacacggttaagtcaggctattatgtggagcaaatgtctctaggtgaaaaccaagttcgataatttggcccgaacatacaacccctccaagcacactcttggaaagttcaatgcccgccaaaatagagacatttcatttggcaagttattactcgttgtgtgcatgtaaattcttctttaaggaaaaaaaaatattcattgtgacattacatgtgttaggtgtggggccctagaggaaacgataaatcacactatttttgagtgtccaccaacacttcagacttgtgcattattaccaacaccaatggtcctgggagtcttcccatcttcatcaatctatggtaatatagatcatttatttaggagaataccttcggatttaaatagctctagttttccttggatcatgtggtacatatggaaagcacggaatgaaaaacttcacgagaatatttatcgtgatccaagggagattcttaagttagcagagaataaagcaaatgcttggtcattagcccaattggaggttgttatatgtcctggtgatagatgtgcgggttaacataaaccctttaggacatcattgtttcattgatggctcttggaaagatactgatatgttctcgggcatgggatggttttgtacactaccatcaggaggtcatccagccatgggtgcgaccaacctacgaagaagtctcacatgtctacacacagaagtggaaacactcgttagggcaatgagatgcatgattggccaagataagcgagaagtaacattttttacaaactgctcagacctggtgaagatagtgtcttctccaacaaagtggccagcctttactacgtacctataagcgattcaagaagataatgatgagtttgatttttcaatttatctttaatttcccgaagtgcaaatgttaaagtgaatcatttggcacgaaatgttcgtacccaaccgcatcttattacatatgtaaataatatttctcaacattgactcatttgagttaatataataaatatgctggaaaaaaaatatgcctcaatcaaaataagcccaattgccgggagattctacgggctttcacgataggcaaaaacgttttgcaaataaaatagttcttttggcaaacatatatgcgtgtttttgatttcaaatttttactagattctgaccggcacgtacgtgcgatattttatattgtttaaaaatgtatttaaacaaatttttagtaaaagatattgtaatgtataaattattatgtacatagaaaagtgtatagtgttatttatgacacaataactaatgttgtgaaccgcaaattatgcgggttgtaagtattatcataaggttttgataaaaatttgtattaaatatatttgaaaataagatgcgtggaaagttatgtaaaaataatattgttttcaaaaagttttcattaagattttttttttttttttttttgtgttagtgtattatataatatcatagatatcataatagtaacattgtattgtaattttttcttttgttcttaaaattacttgggtacacatatttttttctattttattatttttaaattttgaatagaaattttaggtatttaaagatttaatcatttttgtatcatatattagtgttttatttataaaaatagtttgtttttgctacataacaaataattttaacagtttcagaagtctaatagttataaacttataatagaaatgtatatttgtgaaaattatattttaaatagtgtaaaatttggtaactcaaaaaacctctctaaattcaagccgaacgtatcttctatcgcctatctctaaatatttctatttctcgcaaacgtatttaatcattttaacgggtttatatattgtttgatagtttcaagtttaatgttcacaagtttaatataaatctacctgaccattaattcaatttagtttgatctcggtctggccgtttgattgttacgaatttaaaaatactactaaactcaaatattttaaccatgtgatatgagtttgggttatagatactataactatctaatatttttttttaaatcagacttatattatatttcaatctaattttttttcttctaatctactcttcagttacacacataaataacattttaaatttttatgtgtacattataatttatttaatacaatatataccactaaaacaataaaataatcatatatttaataaaaaaaatattacaacacattttttaaaatatgaaataccacacgtatcccgcatacaagtaaatttcatcagaaataacaggaacacgacttatggtagtcgttttaatcattgacattttaaaatcatgttttgttgcgctgtactttcccattgacttggcgagtgtaaagttctcaacattacgtcactctccaggtaagatgaaccgttgaagtgctctcatctgttgcttcttaatagtagcatgtatcaaagttccatgttgattagtgaaatacaattgtgttaataatataaaaaatacatcctgatataatttagatttaaacaaaaatctatacttccatttttatcagctagaatcatttccatggtttctcatgaatattgtgtgtattgagtccatgaatgcaaaatcttaacttggatttttcattcggttttgaaaggctttacgttagcagggtccgtgatcaaagcaaatgcagccatttttgtataagcaatggtattagtaaaggagattgctcgaaacgtgtgtgtggttttttactttcgtctttgaaccagtatttataggaatagttaagatacatgcggttaggtttccataaacgaatattctatagttacgatatgataccaaatgatccgtaattttagagtgttgataattgttaaatatattaaatgattattttgataaaaaaagaaaaaagattatttatgtttggtagatattctccgtgaagttcaaatttacaatgtgcacataggatttacaccgtgcacataggatattctatcgccttaaatgattgccatatatattagtttagatttaaagagttttgaacaatttatataacaaactaacaaaattctccgtatctatatttgcttccgtatctatatttgcttccatgtggtcacatgaactgaaccatattgcatatatatgtacgtacatagtaactatatacgattaatgcgcatatctgcacatattatatagttcaaacttcaaaaccttctgattagggaaaataatatatgattatctatgcatcatatttttcaaagtacagccacaaagaacaataaagtttggtgctcaaggtagtcaaatacaattagtcgaatcacttttatgtagtgcatctctaaacagaagttaatttcaattcaaacatgaattccatttttgaattattgtgcgtgtgtgttaaaagatccatattttttgttagcgagcaggtcttcggtctcatacatttgttataattttaaaaattcataaaaattttgtaatatgcatcccattaagctcactaatgtattttggattagttgttaaattactatattacccatataaacattcatttaattagttttaaactaaccctcaaacgttgtagttcacacaatgcttgccaattaatagtatagataaccggtaaaaataaacaaaagaaaaatagaaaacaaaattagatggctagattttgtttttttattgatgtttatattattttgttttcaatcatatttttcatgcaaatttctataaaacttctttcacataatattttttcagactttttaagaagtgaatgatgcacgaaaccttgcatagtatttttcttttttgaaaacaaattcaattttatatagataagtttctttttaatgttagtaaagaataaaaaaacattttgaattaaaaatccctctctctctctagatttgtaaacatgtggatataaaaaatatttactaaataataatgattatatttgagttcagaatgataaccccacatttgttataattttatttggtaaataattttagaaactgtattttgacatcacacaatatagtttaacaatatgtttctatcataataaatttgaattctatgcagtggtggaccaaggatctgtttttaccagggtcaaaatataactaaacataactactaaattttcttaaaacaagaagagctttgtttatataaaaaaaacacaagaaaagtttaacatttaaggtcaaacacaatttttttaaataaaaaatatgtatacaatggggtcaaaacatgaaaatttggaaattttacaaaattttatgggttaaaacacacacaatttggaatttagagggttcaaaatagaaaaaagtaggaaagatattgaaaaacataaaggatcataaaagaaatttggatttttggtgggtcagctgaaccccattcactctcaatgggtcctcccctattctatgtgctcagtcttagttgtatcaaatgtctatcttagttaagattaaaaataattaaaaacttaacaaaaactaattagtaagaaaatacatgttattgtataaaatcaacaataatacctttttatgcacttaactattattattaaataacttatattgttattttgaacttcaaaacatgttgtttatttattactatccctgctgaatttaaatattttgtttgatatccatgctaaatttttgattttttgatacatatcaaaatttaattaaaccataatacacataaatactatatgtaaatatatatatatatatatatatatatatatatatatattatttttaattttctttatcgagttaagaaaaaaatagtttatatatgtgcgtaaattaatatttataactatttcctatttctatatttaaatatattaacaaatttaaatttaatacgtatcgatatcttatgattcacttgacatgtgttgcgatcacgtgagtttgcaactttgaaaatccaattttatacaataagataggtaatttctttaaaaaaaaaagttaatagtagagaaaatatgttttatctgcacctatgcgaaagagaccgtgagacttgcagaattttaactggaaatcaattcttataccaagattatctaagaaattttcgtacgtttgttgaactttctaagtgctggtgtattttcttaataaaaatccctagcctaccatattcttctttccccaacccttaagaatatgaataagcaaaacttaagaaccattttattatgcaaacagcacagattataattcaaactgagagatattctattattattataaaacattattccacacatttctgaaggaactgcattacaaactcaccatggtttattttgatgcatacttataagacataagtgtatatagagatgcaattatgcatggtggactggtggtgaatttattttatagttttaacttttaaacacccggtttcgtctgaacaggttcgttaagcccgtggcctcctcctccatggtgtcctccacctccgtagtgtccaccaccaccgtggcctcctcctcctccgtagtgtcctcctcctcctccgtagtgtcctccatgtcctcctccgtatccgtcaagtccgtggccccctcctccgttgtgtcctccatgcccgtggcctcctcctccgtagtggcctccccctccgtgaccaccatgtcctccgtgataaccttcaggttgcacagttgcctcactctctggcttcaccatgcctgcccaaaaccacatgttatttcaaagacattctaatcacgttcaaatgtgaattcttcttcctgacttcaactttgttttcgaccttaaaatgttttttcaattataaataagtacataaactcgaactatagtttttaaaaatatacgttcgaaacatatttacacaaaactacaaggattccacatcacttaggttaggtgaagtgtgttctgacttttaactaaagtaaaaaaaatggaagtacgaaagagttggataaatttatcaaatggtacgttaattagttcaaattcaattagctagactgaaatgtaaaaaataattttacatacccgactgtcttgcggcagaaacttcggagaccaccagaagaattgcgaagagacccaacagaatcaaagccttggatgccatgtttttcaagttgtaataactctcttagtatgttaagtaagtgatgagtaaaattttacgctgcatgctgtctatttatagaaaacgaagaggatagggaatgagaaaagtaaaaaaaactactccatagtagaataaaaagaaaataataatttatcaaaatgaagcaaagttaaatgaaatttatcacaatataaacaaagtagtaataatataagtatcagagtattattatacgtgttgcgtccggacccttatcgtccgttgctagattcattgtaactacatttgaaacaacgtgaatggcaactccactagttatttaataattctataaacacagccctggaacaatatcattatattaggttgttaatgtttattttcgttttgttaaagaatgattatacgacagaaaagtcgttcaccattaatatacttgttaaggatctttcttgaaatatctgccgacagacggataaagacaaatctatatgcactgaacaagagtaagtagagcataaaggagaaatacgtagaagcaaaactactgaggacttactttagaggtgcaaaagtatggttagctagccatcgtgactacgatatataattctaatggaacttttgcatgggtatatatctctgtccatcaagaattatctaagcattatccaaatcacggagtgtattcatgtagctagctaacatcctttctacttgcatttgactctagtgaatttcttagcactttgttttggctaatttggtactttattctatctatctacttatctatacaatatttttttatcgtcttaaaatttattatttattgcaaattataataactgttacatagacgattctattacggataattcctttcgatccttattagatttaccacaaacgacacctccttctccttctccatgctcttgatggagagcttcaatgattttctctgcatagaatcttggcgaacaaattactatttttttttctttgataaatatgttaattacatttaaatgaaagtttgtagaagttacaaaaacttaaaacataagaacatcccttgccaaaaaaagataaaaacaaggaagaaaccgcttaaggaaacacatgagtaaaagctctactcatattttagccaaatctgccaagattacgtctctgatttgacgataaagacacttgaacaagatcgagcatccatagatatgttgttgaattgttgtgatatctgttgtttcgttccgtccaaattgcatatagcgtggcatgagcaatcagtctacgaagacaccttggagatctacggttttttaaatccaaccaaactgagaaagcatcccaagtgtgaatggaaaggtgaaaaggttgtatccaaatcccctcacttaattcgcaatgaaggaaaatgtgatctctaggttccgggaataaaccacaatggcagcaacttgcattaattacgaactactatttgagattaggacatacaaatcacaatttttgagattgagacaagcgacttgtgcttaaaaaaaacaaagaacaactggtcaaggaaacatttatacatatacgaactcgagttttactattaacagatatagctgattgcaatagagagacaactagggtccaaatttgggtatgaacttcgtaattatcaaaaatacataaatttaaatgagactcattaagttataagcacataaacaacggcatcattaagctgaacaagtcaaagagagagagagagcatgcaatttaaaattacaagaaaatactaaaatactgatgataaagtatcactatactgaagtgaatcgatctggttgcggacgagatctaagtttcactttcacggccaaggaagcttgctttttctatttgacacggtcaatatttgtaaagattatctagaaggttgtactaacatctaaataatgaataattaggtgggataacaaaattttggagtaaactaaagtaaaaaagaaatgttatgagtttataaggataatttgtaaattttatgggaagagcaatcttttcaatacattaatttttatataaatggctgtcagaatttgaaatttagtcgttcacatagccgttcatgtgttttgaaaaaattgggcaaaaattaaatataatggaacgaaatatggaaataacacttttctgatgtgatgtgattttaaagaaatatgacacatcgatatcaagaacctaaattcttttaaaattatcatcatttgataattctctacacgaaaaaaaattatgagtgaatatgcagattttgacaacaatgaattcatagactgcacgaaactgttggaatccaaaaaactgaatcaaatcatatcagacagttgagatatatctaacttggcttggtaatcaaagacgaagtttgtccgagaagatctggtgaatattcttctcgcaatatatggaaagaaataagcttgtggaacaagaaagattttgtggttgattctcgaagatcctagggtttaggattaggagattagtataaatgctctagtggttggttgtaaccgattttaagcactatagaatattgttgtacggttgcaaactttgaagctagcaaaaaagcttagaaggtgagtattgttaattctctttgtcctcattcttaaggtatttttagttgggtttgattattcgggtaaaatagatcaagtaacttccaaaataatatagttcttatataagagtttcattaacaataagaacaaaagaaaagcgagtatttgacgctttttaaacaaatcgttatatactttctatacctctacaattaagacatacaaattacaatttaggttaagataagcgacttgtgcttaaaaaacaaacaaagaacaactggtcaaggaaacatttatacatatacgaactcgaattctactatttacagattgcaatagagagatgactagggtccaaatttgggtatgaacttcgtaattatcaaaaatgcataaatttaaatgagactcattaagtgataagctcataaacaacggaatcattatgcggaccaagtccaaaagagagatagagagcatgcaatttaaaattacaataaaatagtgatgagaaagtatatcactactgaagtgaatcgatctggttgccgactatatctcgaagtttcactttcacggccaaggaaggttgctttttttctttgacacagtcaatatttgtaaagattatctagaaggttgtaccactaaaatcgaaataatgaataattaggtgggataacaaaattttggattaaactaagtaaaaacaaaaatgttgtgacttatatagttttaaatgataagttgtaaatgttatgggaagagcaatcttttcctaggtaacatattaatgctctttacattacgttaatttttatataatggatgttagaatttagaatttatacgttcacataaccgttaatgtgttttgaaatagaataactatgttatatgaaaaatcaggcaaaaattaaatggaacaaaatatggaacgaacacttttttgatgtgaatgatttaaaagaaatatgacacatcgatatcaaaaacctaaattctttttaaatgatcaacatttggcaattctctacacgaaaaaagttatgaggtttctaggcaattctaaaatattagtctctaagatatatcgctaggagttgtttcttacgtatcgatcacactattaatatataagatccacatacatccctcaatcaattcactatatagaacttcaatctggatattcaattcatgtaaaatttgcccaaatgatgctaaagaattgtgatttttgcgatatgggttgcactgtctatttaacagaaggtaaacggtgcacacacctacacaaaaaacaaaaaaaaaaacaaaaacacacacacacacacaaacacaaacacaaaggtaaacctggtaaaacattcagacaattaaggatgagaaactgttgatttactcgttagctctgtagagattacatagtttatagctctgtaaacaaaatttcctagtctctcttaaactaataaaaggaaacctaattaattcaaaaaaactaaataatgttaacttcttcctccttctacgagacttggcttcacatgtgcaaatcatgttaattatgcacatgatagttacatgatatcttcttctaaccttaaacttaaatatatatactttcaatctttcatataccaagattcgtggctcctctcactcgaataagctctgcctctgcgattatgtgtttcgcttattgaatcacagcatttggtgagaatgcaacaacattattggtgaccgcgcgcgacacttcgtgtctcactacttgttcagacacaaaacaaattactttttcttcaagaaacatagtgcatttaacgaaacggcaaagatagatcacacatttcttcaagatactttttaacctaataatgaaacataaacgtttcattgttcttttcttttgctgagaagttttgggttattttcttttgctgagaagttttgggttatacacatgggcggaggtatattgtccacatggagtcaattaacctgtttgaatttttagatttttttttatttacttgtagttttagaagcaaactttataaaaatagtttaaaatgtgtttattgcccccataaaatttgtttaaaaatagatctctcatcctttgtaagagttgtaacgccaccgtttctacaagtactatatcctcttttagggcccgttggcctattttttttcgataatcggttttctatgtctgagaggctttaaagacttgtttaccgatcctataaatcactatatgatatttcttcatgatttgtgctcactcgcatggttccaacaatcaattttgggaaggtcatatatcatgaaattactccagcccaaacacgctcactgtggagttctctcatataattgaccaatataagtgcaattttattacataaatggccacatcaattattttaaacctttctgcatacactactatattctttaaactgaagtagtacaagagtaatggctagatcccctactgcatatgcctatacattctcttatgccagagacaagaacatttaatatgatttcttcacaaatgccgctcaaaccagcattttctagaatttatgtaagaagttttatcaaatgagtaattgacacttggtaacttattgtttcttcatttctaagaagggtttaaattgcgcacagtagccgttgacccacttttaatttcagattttgacactgtgggctgggcctttcattaagccaaaaactgaccaaaatgcccctgacgaaactgaacccggtttgtacgtacggaccgcgtcgttggaatccaaaagaaccgggttcgtacgtacactgttcatcgacgagaaatgcattaaatgatttctgggtttcggcgaatttgacacttgagattggaattaaaaaaatttaaaattggttgggctcagaagtttttaatgctaaaaagttttgacaagactaaaagtcatgattacctattataatagagattatattgtaagatatttagataatttagattagaattctgggaaaaaaacaaaaatcgaaaaattgtgttacggtgaagaaacgaaaatcgaaattgtgttacggtgaagaatctgaagttttcagttgctgttttacaaagtttgaaggattgaaggggagacaatctgtgttctgggtaagaaattcgtgttaatcctattaattacacttgagaacgtgatgtgaaagtaatgatacgtttttaaaaaattttgggttcataaattgttttgttggagattctttttgtatttgtagatataaatgaaagttctatgttctgttttgttaaatttataagtacataaattgttttgttagagattctttttgtcttcgttgacataaatgaaagccttcaaaaagatctgatttttttgtatttaatgttggtctgacctgaggaatttatgttgcaggtatggagttacctgtattaattatggttggtgagtggatatacaaagaagaaggttggaaatttgaagctgaaagagcaagtttcggacactgtgtatgtattacagacacaacgacgtacacggatttggcaagtacaatatgtgatgttttcagctataactttagtgaatggaaccctataataagttactggatgtctggaaagatgtctgatatgatagcaagtaatcgccctccagtatatatcgagaatcaaattagcctggatacatttatgttgattcgtaatggcgatccttctgttaacttgtttgtgtctttttaccctatcggcaagggaggccatacagagacagaggttacaaatgttgatgcagctcataatttttacgaagatataaatgtagatgaggaggatgacatagatgaaggtgatgagaatgaatatgaggacgaggataatgaagaggacgaagatatggatgtacatgacgatgacaccgatggtgaaagccgtggaagtaccctcgaccctacagtagacggtagtgaaggtagtggcgaagattacgattacaataaatggggtgacatgattgtggaacaatatggaaatggtcatattgaggagggcgtcgtgaatgacactcaacaaaccgtggaacccccaggggaattcactcgtttattggcatcgtgtacgtcgacgggtacacatgtacctcatgtagaacccactagtgttttggttgactgtacaccaacctctgctccatccccgacgtgtcaacatggtttgtaccaatgtacgtacactagagtcagtgcagaggagacaagatgcgaaggtgaattagttgagcacacagatgatatagctgagaacgtaactggagatgatggtatagtcgtcctagaaggggtttctgcaagtgggttaaatattgaatctgacgaccgtctagtgacaacaggtgaagcctacgaagtgtataaagggttttctacattgcttaatgctgagaatgagttgctcgatactgatgcggctcctgtattcgatgatttagccaatgttcgagtcgatgagacagaagttgaattgagtacgtcaggtcatccgttgtatgtgggaagtgttttcaaaaacaagcaagtcatacagcagactatgcgacttgttgcaatcaaaaagtgcttccgctacaaacaaactcggtcatgccctaaaagattagagatggtttgcgtagatcgcaattgttcatggcatttgactgcacatgtcatacccaattccaaatgtttcaaaatcacagggtatgattccatccatgtttgcaagatcaagactcgaaaggattatcgtaaacatgcaacttacaagcttttaggcgaggttatgaagaatagatatagttcttcgcaagggggtccgagagctgtagatttgcctcaattggtcttaaatgatcttaatgttcggatctcatattctacagcatggagagctagagaggttgcagtaaactctataaggggtgatgatatggctagttacaggtttttacctacatatctgtatcttctacaattagcaaatcccggtacaatctgtcatctccactccactcctgaagctaaaggtcgccagcgcttcaaatatgtatttgtttctctctcggcgtctataaaaggttggaaatatatgaggaaagtcgttgttgtagacggaacgcagctagtcggtcgttacaaaggatgcctccttatagcatgtgcacaagacaggaacttccaaatttttccattagcttttggggttgttgacggcgagaccgatgcttcatggatttggttctttgagaaattatcagagattgttccagatactgacaatttgatgattgtctcggacaagcattcttccatatataaaggcgttagtgtggtgtacccgaaagcccatcatggagcatgtatagtacacccggagcaaaacatatcggtgtcttacgcaaggtacggtgtgtctggtttattctttagcgccgctaaagcgtatcgggttagagattttgaaaaatactttgaagagttaagaggttggagccccggatgcgcaaagtatttagaggatgttggatttgagcattggactagggcatactgcaaagaggagcggtacaatatcatgactagcaacaactccgaggcaatgaacaatgtcttaaggaaggcaaaagcgtatcgaattgtctatatgctagagttcatccgagaggtcatcatgcaatggtttgcagcaaggcggaaaaaagtgtcgaagtgtaactctttggtcaccccggaggtagatgaacgtttccttcaaggcttgcctgcgtcaggaaagttctcagtcatgatgtctgggccatggagttatcaagttacttcagagactggtgagcattttcacgttgtgctagatgagtgtacgtgtacttgtcttaggtacacaattttaagaatcccatgcgagcatgctctagctactgcaatacattttggcatcaacccgaaggctgttgttggattgtggtatagccttcaagtgttttctgattctttccaagaacccgttttacctataccggacccaaaagacgttgttattcctcaagagttatcggacctgattctcatacctccacgcagcagacgaccacttgggagaccacccaccaaaaggataccatctactagggaaaaccgggtaagattttcccccatcctcacttctatgcaatttttccttccttttaggcgccttaccattttttaactttcagaaaaagaggcagaaaagactcattcctaatcagtgtacaagatgtcggaaaacgggacataacaagaagacatgccaaaaccctatttaggcctcgcgatggttagagtttacgtctccgtgcttttggaagctgttctacgtacgtttttggaaatcttttgatcagtctatgtagtaatattacatattattttgtctgtacgttaccttatgtacgtacgtttgtggacctcgtattatcggtgtatttgattatctttcaactttttgtcaatcccgttgttttctgtacgtacgttggataaacgttttcatttgtacgtacattgggtacatctaattatacagagttgacggttacatttttttagtataccgttacatcgatttgggaccaatcatcgcgtctttctaaaatctatttaagaaactggtgataacacccttaattcattcaaacaaaagtccacacccatcacacaaataagacagaaagtcggttattctggtttttgttgttgtcatcatggatgatggatatcatgtcatttccgaactttgtcccatgatcaccggatggagtatgcgcgcttttgtggtcagggtgtttcaaaaatgcgtgggaataaatgagttcgacatgggtctcatcttggcagataatcgagtaatatttcgccaatgtctttataacgtttttactttcacataccgtacatatcactaatcatgatgatttgttgtagggaatgcgttcccgcatagagggtaccattaatcgtcgccttgcttcattttactctgaccgtatccgagaaaatgagtggatagttatcaatactttctcagttcgtctccacaacgaggggatacacgtaacgtcccatgactaccggatctgttttatggatcagaccattgttaccaaagtttcgggattgcctgcaataccgtattatgattttactccttttgactacatcatcgagaggacagtttctaccggagtgttagtcggtttgtatatttgactgtctattcatttttgtaaatatgtacgttcacataatgcttttatctttcattatgtacaccagatgttatatattggtgcgctcattgaggttggcaacttgaccgaagactaccgtgggtggaagcttccttttaagataatggataaacagtaagttgtttattttttaatgttttctcctatatgtttgttatatccttggtataatatatattctctatagcaaggaagttcttcaatgtgaagcacaaaatgatcaagctttcgaatttcaaagattcttccagcggctaactggtcctcaaaagattatcgctctcgtatcatggcgtctaaccgggatccataaactgaaggctgtgaccaatggccccatctccaaagtcattgctaatccggatataccggaagtggaagaaatcagaatcgttgtctattagtttatctcttgtttcttttattctaaataactacagatttgtaaccaaatttaaacatatccctacatttatgctaaagttttaccttttaattgctacagtttacttattacaaatacagcctaattgtaatgactttccatggacgtacatttatgtttgtgtacgttcaaataggtgtactctatgtataatataaacaaacttagttccattcataacataaacaataaaacaaggaaataaaaaaacattcaaataagagcaggaaatacaaagcataacaacaaaccgagtagagcatacaaccaaagtattaaagccgaagcatataacaggaaaacatatgctttacaaaaacccgaaattatagccgatgcatagaatgggaaatcagatgctgaacgaacgcctttccttaataaaatatgcacaactccctagcataccagtagaagaagcaattgcggtagcaggctccgtagctgcaacgacccaagcagtctggtgaaaccacgaacctccatgaacgattccacaaccgagttccttcagcatgcagtcgacttatgtgatacataaccaactcccccactgtgtttgcagcttcgaatgatggcactaaatcccagaaagtcgcgttcacggcttcaacctctcgtccgttgccagttgcggttagggacagaccatgagagaaacatgcgtaagcgtcgatgggcgagatagaactcaacatggttaaaccatgagcaaccgtaacgaaattgcaagctaaacgaaccccttcaaggtaaatcgccggccttgctccacgttcaagcaggagggtgaaatatgttcggaaaggtgtttccggcaacacgaaatcaagtcacgtcataaactcatccatgttgatagcggtcggctccagcgtgctaacgagacctctgagggtttcaatgggagttacggaaacgggtaagtagttgacgaggatgctgagtgggttaggtagctgaatggccaggtaaatttccgccggtgggggtgtggggacgtccattgccgagactgagggatttatttgtgagtttaggttatatatggcgtagtaagagcaatgaaaagtgtgcagaagatgacttgtctcagagtacatgttatatagacctaatgacgaggagacaactaattaaatgtttgatgtcccacttacatattgtaggtggtattaatattggacattaactcgtgtttacatgaaaataataaactataaactatttccgattaaaactgaaacttcaaattacaattttcgagtttattggtttatgtacgtttagatttacacatgtacgtctatattgaaatttgtaatttttaatgtaaacccaagataactcgtcgactcattagttacatgtacgtcattagtaacacgtgtacgtctatataaacctatacgccgaattggagtgtatttattatgcctggtcacgtgtatcacaatactgtcttttgcgtcaatccaatcatatttattcctacatttatagtaactttaaagttataatgtaagtacagaaagaagtatggattacgaaacttcaaatttattgcttacatccgaataaaccattaaaccgagaaactttgtaaaccagaggataagcacaaattgaaacataactttatagaagcattacaagaacttgaacaacttcacgcatagaggataaaacgaaatagaaacataacggcattagaagaactaggaacataacttagacgataacattaaataacaacttcaaataactagtagatttatatgactagagcatttggctaactcgcctagcacaccaccagaggtaacaacagttacacacgttcttgaacggtccagatacaatgtagcaaagtaggacgcaatctggagttttaataccatggctgttaggataagagaacgtcgatccgtaagtattattatatggagggcaaaacttctttaaatcctccaggaactcctcacacaaatcccgtgtctcttctgtccccaaagaataatgattgcgtccgaataggtttagaaacatggctcccatgtaatcattcccgtcaattatgtaaactatcgcacaagcaagtgtagcatggacttgtgatggaacatgaggtcgtaagaggttgatggctcctttagtgtcacgttcatgcgttaaaacacgaagagcttcaaaatacatggcagtcggattgccagcatccacacaccttttgaaaaggctcgatgtcggccttcttcttgtgcgccggatggatgatggctgccatcaacttggtagtcgtcgggatcctcacacatgctaaaaatattagcacctttcaggacatccggacggtaaacaacatctctgctacgtctgcctgaccgtagtagtggctgaaggtcccaccagcatttgtgaaccactgtcttagcaatctttgcgagtaaatcgtcaggaatagtgaggttgaccatgttagaaatgagatactccgaagaggtcagatcattgtccttttaataacccaggagggagggtcggatggggagatagcggttacaataaatttgtcaataaatgtacgtatagagtaacagtgtacgtacatatataattctcatatttgcggtctaatccgaacgaaatttatattaaatgattgatatatgtacgtctaataaggagttacacgtgtacgtatatttattataagactaaacgttctggcaattatgacaagtgggagtgtatttattaattaacgcttggcacgtctttaataagactgacattctgcgtcaattgactgacatatatccttacatttattattacatttatagttagaatataagtacttgttagaatgtaagtacttgttagaatgcaagtacaaccgtaagtttagtttgacaacagaaatatattattcatgaccgaaatatattattcatgaccgatagaaccaaaccgcatgaaacagacacagaagttgtaaatagggaatttaaaggaaacggaaacaaaacaacataataggtaatttcaatgaagcaaaaacaaaatacataggaccaaacacctaacaaacttgaaacacgtgacagtgtacgtacaccaaacacacgtacaaatgagagacctagagcattcggctaattcgcctagcacacgaccataggtaacacttgttacaaacgttctggtatacactagaaaccatgaaacaatggtaggcgcattgtggcatattaattccatggctgatcggataacagaacgaacgagcgtaagtattattgtacggcgggttaaacttgtttatctcctcgaggaactcctcacacaaatctcgggtgaaatcggactcctatggatgatggttgcgtgtgtagaggtcaagaaacaacccacccatataatcataccacgcacatataaatatgatggcgcaggcgatggttgcatctgctcagacgggtgcatgacgctgtatgagcttaagtgctccattgatgtcagtttcatgaattagaacacgtattgcttcgttatacacagtcgtcgaattgttagcgagaaggcaccttttgaaaaatggtcgattgcggccttctccttggggtccggttggattatggccacctcctacttggaagtcatcgggaacacggcacaagctgtagatgttagcgtctttaaggacatccggtcggtagacaatgtctcttccacaagtgccagatcgtatcagtggcttaaggtccaaccagcttttgtctgccactttcttagctatcatagcgagcaagtcgtcggaaatagtgggattgaccatcttagaaatgagatactccgaagaggtcaaattcttcctcccatttaataaccacggatggagatattgttggggaaattacagttacattcaatgagaaatttaattttacattgatggatgtcaaatcaatgttaccgcctgtatacacaacagtcgtgtactgtggacacgtagtttgtacttactttggtaagatatcttgtttttgtacgttgttaattactacataaaatgttgcttagcatccaaaagtaataaattgtttagaaaacaaacaagtaaatgtaaacacaaccaaacacaagttccaaaaggcatacaaaacacataagtttgctttagttgcaacttcaaataactaagttaatgacccaattccatgctcgtagaggtcgactgtgtaacccttacggaagttgtacatatcatcttcttcaatcgaaaacatgtcctcaacaggagtgttaagcatgtacaactcaataaactccatcgcgtacggaccgcaatctccggtagttggattctgtgctagacgttgattccttatgtatgtaaaaggagtcacgggataaggcttatcgagataatctttgcatgtcgctctgactaggtacagtagcatctccattattggaaggatacgtgacctaaccacagactcccgcgtaagcgaacgcaaaggatccatgatttcaatagcacgacgttccaggcatatagccaacccaacccaatgcttctcatctttccagttcatgggaacaaatatgacgtcgacatctctgatccaatgcagctgtggttcacaattaaggcattctcccttgggaaaccgtgtgagatgtttgtcccatttgaaagtctcggggttacgacaggatttgaatgcagtggcacagcttgacagaaggaaagtgagttagggatccaccacgacataccgatttctcttcatatgctccccgttcttatgccacatcaagagtgccatcatttccatgtgctgaaaagtacataaaagtatgatgttatgtacgtactttcaaaaacatattattacatatacgtacacttacaacagtgtacgtaattaatggtcacttacgtatgagccaacccaatcattagcctcggctagagttatgaagaattcgttgcccacttttcgaaagccgaaaagagtatggcacctgaaattagtaagacatatgaaatagttatgattgatataagattgacaaacaaacagataattgtgtgaatgcacagatgcataccttttttctccttgcattatattgcataatttctggaatttagcttcttcaaccttctccaaaggattgtacaacgaatcgccagccttaacaaaaacctccgggcctgcctctctctcctcaacaaatattacatcaggaccttttttatcatcattttttgtgtcatcggagaaggtaactctccgtcttacacttttcttctctttctcatttacgggagcaacgattgcttcagtttgagaaacacccgcttcgacaacatcgtccttctttcctgtctgcaagcacaaaatcatataattagattggtcatggaaacaactacaagagtacgtacactatatgcccgtctagtagaaatattaataggtacacgggataatatactgacctcttcggggatggcaaccttttcagatactttttcttcgagaatatcgtctttcaattgagtaagcacctaatgaaaacaatttaacaaacatcaaattataactccgacagtaatgttattaatagttagctaataaattacctcttcagggacgacaaccttctcaggaattttagatacattttctgcgagaatatcgtccttcaattgagtaagcacctaatgaaaacaatataacaaacatcaaatgatatctccgacagtaatattatagttagttaggaacttaccttgctaacaactacggttggtgaagacaggtcactgagattcgcttcataatcaaaatcccctacagtcctcggaggaacaagtccaggtaacgcagtgtccttcagatttagtaaccaaataattggttatatctctaattggcaaataagcgttacaaatagcaaaatagtaacacatacctccaaggcttcatctacaacgcttggagatttagcctccttcaaagcttcctctccatccccacaaattgtttcagcctgacctcattatatggagatggatgtccatctattagtcaaactcacagcaaaacattcaaaggtgcgaaacagatttcaaaaacattgtacgtacactgggattgccatcttctgtaactttaaaagcaacttcttgcctaaccttgacctccggtgattgtggctcctccaactgttgtgactcaggagcaacaacgtcttcttcacgattaccaccaaggcctttcgcaacgtcctatacaaatgcaaacaatacaaattagaaatcatctgtacgtacactataattagtagtacgtactcctgtacctgatgggacgaggaagatacatcatctgacattttctcaatggctgggtcagacagtattgggtcaggcaggagttcttcaaagttaccaccatcaggaatgccttgttcgggctgttatgtcaaaagtaagaacataaagaacataaaatattttgtacatacaataatgaaataataagaacacaagttacctggtgagatggtgatggaacatgatcgacattgtcttccattacagagtcagagacattttggtgtaacttggaagaatcttcttcaatctccgagttccttccttcctccttcgaaatcaaaaccatacaattggtcagtaatatttctttatgtacgtacaataaggcaaaaactgtaacatgactattacacaagtgagttacctgttcagttgatgatgctccacccaaatatatgttgtccatatcatagtcagagacggtatgttttgctgaaacttcgccatccccatcattgcctggtacctcctgtgaataaacaccaatataaggcattcctaagtatttggttgtacgtacacttaataaaaacctatttttggattgtatttacacaaggtacatgctgtagacgtacctcaacaggaagactaccagttgcagccttcttgggagtattgttcaacctggaagatcttcttggaacaaagtgtttttgtttggtggatttctttacagattttatctgtacctgttcagctgccttctcaactcttttgttcaccttctcaacccttttgttcaccttcttaacagttttggtcaccctctcaactttctcagatggtgaatcagatttgtgggatgctcgtgggccttcttcgtttcggtcctgggactgtagagcagcacgtatctcttcacggacaaatacttttaaatcttcaaatttattatccaatagttgtgtttgcctcttgaagaaacgcctcaattcgaccgcatacttatcaaacgcttcgtctccaacttcaccatcaccaccactgggtccaccttcaccatcaccaccactgggtccaccttcaccatcaccaccactgggtccaccttcaccattatcagagtgactaattttcctttttttgttttcaacaggatctgccacccgtctttgcctcttcaaaataactatattaaacggttaaatcatgcattactactcttagaggaacctaattctgatataatttatacgatgaaaagatatggttacctctctctccagttgctgatggtcggacttgcttcttaggcgcatcatcgcctccaacccacattttctcatcccactcctgcccagatttcaacatccttaaaatgttatcaactcttgggtcctctttttctttcctccatacaaaagattttgggcaattactgtctgctgggtccataatatatgggatatccacctacatagatgatcattgttaatttcagagtgtatgtacttcatttttttataccaatgtacgtacaacaacaactgcacaaaccttttcagcagactcgcacgccaatatggtggatgtcttgattggacgcagtttggaaaggtttttaatagtcctctctgtaaagatggcggtatctccttcagaaggtagaagactagcaatagacgggatagttttgaatgcgaggagttggagtccaagtgggaagccatggagtgcataagaatgttgcttgcaaccactccggagtttttgaacatcggtctctcctttgaaacttgcgatacgctccaaagtaagcagaaatgatgtccttgccaagggatatttacagaagaaatcaaggttcttcgtcagctcaactgtcatctcatttggtctcaaaggaggagacttgtcacatattagcaccccatccacaatgataattagggcgagagctaatttcttccatgcaggcatgtcagtttcagaaatcaatctatcccttaattcttcaactgttggatcagctttatcatctccaaacagagtagcccaaattgtattttcaccttcctgccgctgcataacattttctacatccttatttttaggataggttccacattccaaaccagttataagtgcccattctcttaatcctagcctaataggatgaccagcgaataccatccacatctcataacgtttctttgtaactaactgacggcatattaacccaagaacaagtttaccagaaaaggatgccttgttagtagggatcctaaagaggtcaccaaatggagaatctagaaggaacgtcatttctggtgtgtccttaagcgcaactgctatttgaccaatgtactccggtctggagtacgcatttatcttcgccttgctagggtagtgatcgagtgcaaacaacctctgtggtaattcacccggatcattagaagtacttcctgaaagttgaacaagacgaagaagttcttaacacgtacactatattcaaataccaactaaacataaactcgatattcatatacacgtacaccgaaaccttttatactcaatcaactgtttttggcggaaaaaaccaaaaacccctttgtcaattgaaaatttctgagttgaaatctctaaaattaacctagattttgaatcaaatcattctccaaacgaagttagggaaaactaaccctgatttgtcgtcgccgccgatgcctcatcaatatccgaaactcctcgccgccgactactcttcctcgtcgccgccattagagctcttctctgaacagtcaatcgataaacccaaaaattgtattattgttccacactttaacacgaactctatcgaaattttctccactttagcaacgactcgaactcgaacagagcctcaatcggaattgtgtttcagttttgtcggaatttctctggttcttcgaaatcactcttcgtttcatcggaactgttctgctttctcgaagaagacagtttttttatttaatttaagttttaaaattaataattttaaatatttaaattattttgaaaccagaaaacggttaaggaaactgaaccggctctttacggaactttcgtatgtctaatgaactttttaagtgcaggtatatgcaaaaccttgatagtcttagtctctaggttttggtaaaattttctttaaaagaaaaatttccaacattataaataagaaaataaatatgttacaagaaaaaagtgaaagagagttacatgacctataaacgattttattgtgcgagcagcggaaattagtattgtgaaactttattccaaacatttttgaaagcactgcattacaaactcaccatggttatttatatgcataaaaataataaataattgcatatattgatgcaatcatggatggtgctgaatatattatatagttttaaacacccggtttagtccgaactggttcgttaatcatgtgtcctccaactccgtatcctcctccgtagccacctccaccaccgtgaccaccacatggtccacgtcctccactcctccatatgcgtcaagtctgtggccagtgctgatcaaacatatcttgataccttaagcaaagcttaaaaacagtcctttttatacattatgaaaaatcataaataataataaaatatacattaaacctctaaaaatacactttaacaacaaaacaaatttcaaaaatacacttaaacaacaaaataaatcccaaaaaatgttgaaaagtccaattttgaaaaaacatttcacaataaatcaaatttcactattagagatactaattagtttgtatctaaatgcctaaacaaaatcttaaaaggctctaaaaatatatttatggtaaaggactcaaaataaatttaaagtaaaaagccattaaatattgaggcctaaatctattgcttcaatggcccttatggaccgggtctgtctgtggccccctcctccgttgtgtcctccatggtcgtgaccaccttgtcctccgtggccaccgccataaccttcaggttacacagtttcatcactctctggtgtcaccatgcctacctaaaaataaaacattatttcaaagatattgttaagcatgtacttgcaaaatgttaaatgtgcgttcaataaagatttgaaagtatattaatgcttttttcaaaaaaggtttacaaaattaaatatacgttctaaacataatatgcacacaacttctaaaatggtactagaattccacacttcacttaagtgatgtaaatttatcaaatggtactttagtgttggatgattgaaatgtataaaatatttttatcatatatcttgtttctttaaagtagattgaaatgcatacaataattttacttgccgcagacacttcggagatgacgagaagaactgcgaagagacccaacagaagcaaagccttgaaaataagggtaatgtttggaagatgattatatatagatctcttacaaccgacgtaagttaaaactaaaaacgaaaatattaaaagtctaattctataaggaaaagatcagaacataactgcgacaattaagaagcttctactgtctttatctcccttctctgatgatcccatctctcgtatcggtttcatatatttaatgaacttcgtaagtgttggtgtatgcaaaacctcgatagtctctaggtttttagtaatcatttttttttattcctgcaggcttttggtaatcttttaagaaaaatattccctaacaatatgaataaggatataatactgttacaaagaaaaactgaaagagagtaacatgacctagctacaagagattttattatgcaaacagcgcagtttataattcaaacagagagacattatactaatattatggaaatttattccgaacatttctgaaggcactgcgttacaaactcaccatggtttatttataggcatatagataatacataagcgtatatatatatatgcaatcatgcatggtagtgaagatattatatagttttaaacacccggcttagtctgaacaggttcgtttagcccgtggcctcctcctccgtggtgtcctcctccacctccgtatcctcctccaccacctccgtagtgtcctccacctccgtgtcctccaccacctcctccgtagtgtcctccacctcctccgtagtgtcctccacctcctccgtagtgtcctccacctcctccgtagtgtcctccacctcctccatagtgtcctccacctcctccgtatccgtcaagtccgtggccccctcctccgttgtgtcctccatgtccgtggcctcctccccctccgtgaccaccatgtcctccgtggccaccgccataaccttcaggttgcacagtttcctcactctctggcttcaccatgcctgcccaaaaaacacgttatttcaaagacattcttaagcacgtgaaaatgtgaagccctcttcctgacttcaatttagttttccacctcaattttttttttaaagtacatatataaactcgaaactatagtttttaaatatacgttcgaaacataatttacacaaaacttcctaggattccacatcactcaagtgaagtgtgttctgactttactatattgtaagtccataaaatggaactggcgaaatagttgtataaatttatcaaatggtacgttagttcaagtttgaatagctagcctcacgaacatatcttcgttttttgtaagcaggctgaaatgtataatattttacgtacccgattgccttgcggcagacacttcggagacgacgagaagaactgagaagagacctaacagaatcaaagccttggaagccattttttgcaagttctaataactctcttagtatgttaagtaagtgatgagtaatatgttacgttgcatgccctctatttatagaaacgaacagaataggaaatgagaaaagtcaaaaaactactccgtagtagaataaaaagaagacaatattttatcaaaagtaaagttaaaggaaatttatcacagtagaaacaaattaagtagtaattaagaagataagtatcagagtattatacgtgttgcgtcgggccccttatggtccgttgttggattcattgtaactagatatgaataaacgtgaatggcaactccagtccactacgcttttttaacaaaacgactatgttttgtagttgataaaacgacgttgttttattctcttaatcgaaagttaattttatttatgaaaatttagcgatatgttcgaaatggtgaattcaacaaaatttgactattttacaaaaaatatcaaagaaaactttatgatttaaataatattttaaaagttcaagttttttcgtatcaaatttgaaaattgatacattttttcaagtttttctattgtttaagtttgttactatttggatagttaaggcgtgcactaatgatacttgttaaggatcttttttgaaatctctgccgacagagggatatatagagacaaatctatatgcactgaacaatagtaagtatagcataaaaagagcaatgcgttatgcgtagaaactactataggactttcattttagagcgtgcaaaacttttgcttggctatcgtgaatacaaatattctaattaaatttctaatggagcttttgactgacaaattgcttggctatagatacttaattcatgccgaccgcgatcgaaatatctatccatgcaatttatttaatcagtatccaagtcactgagtgtagtcttgtaggtaccatctttctacttgcattttactcaaaagtgaatttcttagcgtttgcctttggcaaatttgaacaaagttcggtcatttcatagtaaagtaaagtatctgtatttaattctaactacaaacatttctatgctaatatatatccaatatttcaataatttaaactttatatctaaatttattgaatcgtgtgaaaccatatatcttttctcatggctactgacgtggatgccacgttttttacgacgttgatgtaatcgttgccacatatttgatgaagttgttgccaatatattaacacataaaatattgttagatatgaattgattactaatgaattagattgggtaccgattttctactagtttgatactttattgtatctatctatatatctatacaaattactatttgagaataagacaaacgacttgtgactaataaaacaaacaaatacacttatactaactcatattctactagccactacaattcacataactgattttatgatatagagaggctagagtccaaatgggtatatgataacttcgtaattatcaaaaatacataaattttaatgatactcctacagtgattgataagctgtataaaaatcggaatcattagcggaccaagtccaagagagagcatgaaatttaaaattacacgaaaaatactaaaatagtgatgataaagtatcactaatcaagtgaagcgatctggttgtcgacaagatctctaagtttcactgtcacgacccaaagtcctttttccgcattttcagacgtggccaaggaaggttacttccttttctctttgacacaagagtcattttttttgtcgtttcctttcacgttgattgtaaagagtaaagattatctagaaggttgtactaccatctaaataataaataattaggtgggatgacaaaattttggagtaaaagtaaaaaagaaatgttgtgacctagttttaggataattttggcatacatttaaatgttatgaaaattgcaatcttattttttgtaacatatttattcttttaaaaatataatatactaattttttacataaatggatgtcataacctagaatttagaagttcacataaccacgttagaataacatgttccattaaaaaatcatgtttccttaaaaattaaatggaacgaattaacgaaatatggaacgaacttttattttgatgtgatttgagagagatatgacacgtacctgtccatgtcaaaaagctaaattatcatcatttcgcaattatctacaagaaaaaaagttgtaaggtttctaggaaattctccagtattagtctctgatatatattattaggaaccgacaaaaaaaagatatatattactaggaattgtttcttacgtatcgatcacactcgtaatatataaaaccatatatattttttaactaattcactataaaacgtcaaatgaatgtttttcatattatcggttaactaatcggttcatggagatgtaattttaaaaacaaatctaaaaatatatataattttatcgagatttttcttttttttgtagttatttaagaaacaaaaaaaattatggtgaaatgttgagattgcaactagtatatggctgacaattcagccaaactctagatattggatgcacgtaaaatatcgtccaaacgatgctaaagtattatgatctacgatacaggttgcatggtctatttaacatatagatttttacaattaacacaaattaaacggtgctaacaaaaaaaaagaaaaaagaaaagaaaacgcatacaaaggtaaacctgataaagcattcagacaatcaaggatagtgcttgttaaatatggctagagactatgatatgagtagaaccatatctccaagcaactaatttagatcacggagtacacatcaaatacacatcacgaatattttgacatgaaggcagaaggatatattcttctattaggatcatttctttttttatattattgattttggaaactatttacttggttagggttttatttcctttcctattattgtgagactcatcgaaagcaaatgaagctttggagggttcgatcgggtaagagagagaattttattcttgttatatcattcgtatatgttacatatatattctcgattatcattctcttctaagtgcacttgggatatcatccatgatctcatcgaaggtatcatggtcaagtttaatttggtttcctcaaggtgtcctggaatactctttaattgtttggttagccatcaaagacatgtttataaccgagacaaaagatacgacgctcgggcaggtactgtactcaaatgacccggaataaagctggactgagccggaccaatcagttttggtatcactttcttcatacgcattaccatcgactttgaaataatcttaaacaagacattacaaaggcttatcggacggaattgtgtaataagctctggtttttccaccttagcaattaacaccaacagagaatcatttgtttcttttggcaagatacccgtcgtgaagaaatccaaaacaaaacgattcactgatgttcccacaacatcccaattttgttggtaaaagacgggttggaaaccgtcaggacaaggtgctttaaacttacccatgcttcttatagccatttccacttcagcattcgaaaaaggcttacacagatctcacaactcttctcccgtcaacagcgcaaacccgtcaggtggtaagcattccacaacaagttccacatcctgcattgagtatagcctcttatagtaatccaaatctagcttttccaattcatgagaactcaccacccatctaccctcatgatccttcaaagcttcaatgcggttttttcgtcttctaataatagtagaagtgtgaaaataagttgtgtttctatcccccaaagctatccacgtttttctagatttctgaaaccacaacacttcttcctgttcaagcaccacctccaactatttgtttcaaacttacaagtcatttaaagtataaaaaaatatcttttatatctatatatatatatatatatatatatatatgtgagaggtagaatataatttttaattaagactttggcttactatttataaagaaatatgccataagttttaattgtggttttgttttgtttttaaatgttaagtagcaaacagttaagttgcaatacacgaaaatttttagtcgttatcaaatgactattaaaaatagcaaaataagaaaaataaaatgaaagtagtgtttcatacattaaaatgattttttgtattttttcttttaaatgaagatatttagttaagagtgggattattaatggatgattcaatgcaatgtgaaacttttaattttttatcattagcttttattcttttttaataatattaatttagaatgacatgtagcgttcactggtgtgatgatgtgtcactcatatgcagagagttggccaactttcatatatatgattagatgaacacccatgctacgcatgagtttttgtttttaaaattatcgaaaaatatgattatggtttttattcattttatgtttattattgtgtaattaataaattcatatctattttatataattataatttttatgattaaattcatctataatttgaaatatcaattttactataatataaatatttatatacctattatcctaatttttcactatcataaacacatacaacagtatatgatatattgatacaatgtatgtagttatgttacttatgttgtttgaaatttgcctaacttaattgtaacaaataattctttattttatatattctttcgtcatctagtacaccaatcaaatcctaatatgctaataatttaagtcaacactttagatatcttcctccgcctatagccatatagagtttcatgttttttcttcttttttttggtatgtttaacgtcccgaaggaccattacgtgaaaaaattgtagatcaatgttatcaagttatcagaacgcataaaaatgaaaagaaagaatatcgtatgataaatcatattcacaaaacatattaataagaaaatatccaagtaaaattattaaattaatatgaggtcaggtagaaaacatctaaactacaacacatcatgtaaatctataccacaagtaaattattagccagtatggagtaatgactattgataaaaagaatttaataaaataaatagaatacaatgaaagtagtgcttaatacatattaaaatctttagaaaatttatttaaaagtgagattaatgaaatatttaacacaacaaaagacttttgattttttctcaattaattatgttaattttttttatttaattaaagtagaatgacacatgtcatattcttgtgtgatgatgtgtcaatcatttgaagagagttgaccaactttcatatatatgattttagaaagttataacatagtgtattcagagttaaaaatgacataactatatcttgcatcgtcagaaactaatatctttattttttcattagtacctatgtataattatttcttataaaatttaaaaccccacttatttggttgataaattatttacttctacattttaagcaaaaacgcaaatcttgcaattatgcattatgcagcaaaaaaaggcttttattaacaaaattcatttgttcacgatatataacgtcattccacgggtgacaatcaaacccaatgcaaataaaaattcactaaacagaaaaattgcacctcatcgccaaagttattccacggtcctagtagttttctattcagagaaattgcgcctcatcgccaaagtaatcaaaaatttgtaagtcttttacctcttttatcaagatacaagatcgacaatagaaaaagaaaatttatataaagctaagacaatacaactggatttcagaaacttctttgatacttgtatatatgtaagccctctctttatagaagccgagagaaatacaaaaacccttttaacctaatggaatcttctgaaacaagtgaggcgtaaaagcaataaactctttgcctttgtgtgtacaaatttatttggtaattggttcactagagtcacatgtgacttcattcaaacaaagtgagtctaaataatattcaggtttgtcacacatagcctcaaactgctccttcttcatttcttcttgaaggaccgacaactcctccaaatgcttctgaatctttcggtctagttctctcatccgagtcgtgcggttcttcgctttcttcttagtaacacgaatctcctcaagctt

SEQ ID NO: 174 - DNA, 78568 bp, Arabidopsis thaliana
aagcttccgcaagggtggtgcatgttgaggatgagagatgggaaacgccggacaccaccttcttcctttattattgattgaggatttcaccgtaagcttaagggttgaaagggctaaagatggtttccaaaagggggaaaaattaagcaaaagagcagaaaaaactgaaagactagagaggtaatgagcaaattgaacagtgacagtggagaagttccgacgccggtgaacaaaagctccaccgacgccagagaatataactcgataaaggtttttgataatcgcagttggaagcgtgagagagagtttttatcggtttacaaattgcaatgactcttcatttaggctggattattaacattaactaggttttgagtttatttgatatattttgatgaaattatatttgagtgataattgttattaaatattatcttatgtaactatcataggttggtctttatttttttaatttctattaaagattttttttttcaaatacgaaattctaaaattataaaaattatagtgcttaagaattaaatctgattaaaagaatcacgaatcaatattgttttcttatattcaaattgctgccatcacttatttttgtattctcttcatatttctttttgtcatcttcttttttaatttttaatagccgttgtcattgttattttcactgtccgcttcttcgctacactcttcttcttcttcttccctttcatcttcctcattttcttcctcatcctatccatctttttctatgtaaaatgttcattattatatggttgaaaacagagcaaaaaatttaaacttactaatcttaaccaaacatacctcaatcagcctatgaattacatacatgaaatagtcgttcatttaaattttcaaactggaaatttgatacctttctaccaaaacttaatgtcatgtctcctaccaaatttcagattattcctagtatgtttggatgttcgtttgatgtctccacgggactggtcagatatgaaacttaaaaagaaatcttctcgatcaggttgaagacgattataacgcacacacaaaaacgtttaattctatatttcaccattcaacctaaagacattaataccaggaatccctacatatatgaattatagttgctttaaagaggtcatgtcgtaattgttttctcacttttcttttccatgtctgataatctgagcttgtcttagagtgtcacaatctgacctctacaagaaaacagtttatttcctagggaccgattcgttagtaaaccgtcggaaacaagcgtttcagacagatttccgagggatttttgtcgtcggtatgacgtggttggaaattatgatccgtcgaaaagtcctcgcaaatatccgagggatttccaagggattaatatttttgacggatttgtgaggaccactatttccgagagattcccaaaggaacaatatttccgagggatttctaagggagtaatatttccgacggatttgtgagggccattgtctccgacgactgttgagaaaattttgatgacatattttccgacggatatcctaggacttattatctccgagggtttttcgagagattattgtatcctagaataataaaattatttggttaatatttttaatttattgacgaaaattacttaattttcttattaaaaatatatcataattgagcatacttgatcggcttgtgatgagaggatgaatggatcatatccctcgagcctctttctcatgtgtattgttgtaacactgaattcgtcatgttttacaccatgtcaaataattggatcataccaatcacatgagaaaacaatgcacctcaaattgatcattcctggataacgaacttctaagattttgtagaggatatcatagtatacaagatcactagattgtgctgatacaccataatcacaagccggcctagtctttttgggttgaagaatcttaaaagcataaccacgagtacaatatatgggatacgcttccacaacatataatggcccattaacaaactccattaaccatgtaggaattgattgatctctagaagacatagatgtaacatgtagaacgtattttataatttgtaaaagttatcttcgcaaatttattatttagtaaaaataaataagaaaaagcttacgtagaatttcaaccagttgcaaaactcagtctccttgagtttttgaacgtcatgtggatattcaaagcgtatttaacccaagtacatcctgaaaattagtaatcatgataaatattagcaattttaattattatatgttacatattaaatttagaattttaataattcacaatttcaatgttaaagctaaaaatttgtacctttcataatctttaagctcttcacaattagtgataatgtacatgtgcaagtgttgatgctcctccactgttagccttcgcttcttcgatttcccacttaatcgaccaactttggcaaataattttgggtctagaaccgggtaaaaagatctctctccaccgtcatcatgtcgagcatgtttccgcatctttgtttggacgtgttttggaaaataatattcggagaagtgtgaggtttcttcgttgatgcattgtgcaacaatagaatcttcgactcttgccaaatttttcactttcttcttaagagtactcatgtaacgctcgaacggatacatccatcgatattgaacgggaccgccaagtgctaattcttgtgggagatgaattggaatatgttccatcacatcaaagaaagacgatggaaaaatcttctcaagattacataagatcaccggtatattttgttccaacctttgtatcccttatggagtaagtgttcttgtgcataaatatcgaaagaacacaataatagctgcgtagagaaagataaaatgtttagatataaataaatatatagttaagcataaaagaaaattgtgtaataatatacctgcaattgctttgtgtacgttatttggtagaagatgctcaaaatcaaatgaaggaggcgttgcataatgatatgacaatcatggcttttcattcattgaaacttcacctctcccattttaacgtagttgcggagattagatgcatagccatccggaaatttgacatccatcataatccactctaagaaagcttccttggaagcttcatctaatcgaaattgaggggttggtgctttcctatttggcatgacatgaagctttctttgagaacatatatcaggcaagtctagtctagacttcaagttatcttttgtctttccttgaacattaagtaggctctgcatgatgttatcaaaaaagttctttttggtatgcatgacatctagaaaatgcctcaacaaaaggtccttccaatatggcaataacaagaaaatactcttcttgtgccaattatgaagatcaccatatccatcaacagtatcgtgcccgacaccaccacaaaccgatgttttctcagcaccaaaatctcttaactggtcatcatgtcctcgccagaatactcaggaggtggaccatcaaagacttgtttattctaaataatgtagtggtctaacgataaggatggtcttctgggagccatcttctgtgacaatcaaaccaacacgtcttccgtccctgtttcagctgaaatgcgtcggtgttatcttgagaatgcggacacaataaccgtccgtgcgttgtgcacccagacaacataccataggctggaaaatcacttttagtctgcattatcaccgcttgcatgttgaaattttggtgggctgaaacatcgaacgcgtctacaccatgttcccataacatttgtaactcataaatcaatggctatagaaacacatcaagtgctttcttgggatgatctggaccaggaacaagaatggttaggaaaagaaactctcgtttcatacacaaagatggcggaaaattataaggtgtcacaataactagccacaatgaatactcccttccatgctttccaaaaggattaaaaccatctgtagacaaacccaaataaacgttcattggctcatacgcaaagttaggatacactgattgaaaatgtttccatgcttctacatttgatgggcgcgctattacactgtctgatgtatattcagcatgccatctcattgatcctgttgtacgctctgattgatacaacctcttcaacctctctgctaaaggcaaataccacatccgtttatatggtatgggaactcttccactagtgtcctgataccgaggtttacgataaaaacgacatgaagtgcggccttcgtcttctctccaataaatcaaacaattatcactgcacacgtctatcacctgatatggcaatccaagtccagctataagtttctgcacctcatagtatgaagctggtgaaagattatgttccagcaaaatttctttcataaaatcagtaatcgcatccacacaaccgtcagccaaatttagttccgtctttatctccatcaacctagtttcagctaagacatataagctgcatcatacaaagacatattagctgcatctaacatatcaaagaatctccgagcttctatattcggttactcttctctatttccatcctgaacaaaagatggtgcatttccctaaatgcatcgttcaccatctgaaatgtgcttacgtctactttcgttgatggttcctttacagtacccgaaatatattgttgactactactaccataatcttgcattgattcactctctccatgcgaataccatatctataacccggcataaatccattcttaaacaagtgcctctttactacaattacctcgagattcttattattcagacaatttggacaaggacataacatagtatttgtttctcgcattatgttctggattgatgcgaatgacatgaattccgtaagaccttctttgaaatcttctgtaagtttgcccgtctctcgattgtatctaggtttatccatccatgaactaaaataattataaggatctggagaagacatttctgttggtattgtttctagtttttttcttgttttccaaagatgtaaattggttggaatatataggcaaatttccgagagatttcctcgggatttccgagggttttgaatttacaacggctattcgaacgaatacatcaacgactacgttcgaacggctatattcaccgattggaaattcctcggaaaaaaacaacggtcaaaatgtcctcgaaaatctctcaaaatagtacaacggttaatatatcctcggaaaccccacagaaaagttacaaatttccgagtacatttgtgacggaagtatatttctccgaaatccctcggaaaatgtttaaatttccgaagacatttgcgacggaagtatttccgaagaactagtttccactcaaaaatttgtcggagaactgtcggaaatgtcgtcagaatacgccttgctttcttgtagtttcttcttcttcgcgataatgactttctttctgtatttctctcttgcttgtcgcaatccatctacctttctctctttctccttcaattacctttattacctagactataacgtcaattgttcataatgcaagaaaactctcatcaattaaatttattatctttattacgtctcgtaaatttatatatacaatctaagttttttttttaaaccacgcaataaattacctaggtcattaaccatacttgcatttatttgtagttcacgtaaacaattatcgctatattggcctaaacatctttccaaaaagaacttctttgcaatgtatgttcctccactcccaccaacactaactccctagatttattagcttgtaacactttctgggcataagcgattgatgttccatctgtcagaaacactgaataaccattcgaaataattttttttagcataccacacaacttgtcccaagtaatttgtattgaaacttttcaaaccaaaatccttaatgttacaaaattacaaattatttgcgtaggaaataaattgaacatggtcatatgtgtagataataaaacatgtctgcttgttgttgatccttcttgtttaaacccaaaattttaactcaaacaacatcaaatcaaggtcttatgtttcataaccgatatgaagaagcacaaacatcgaccaataacgcttgtcatcaatccttcttcttgagactcaaaacttttatgttaataacatcttataccaacacatgttttacaactcgtcaaagatataaagcaaaaacagtctgacagcgagaaaagtatccgtagtggcatatgcgataaaaatatatataaagcggcattattaagagtagtaatcagccccaatcgtgacagatgactcaagtgtacaatttataaattatgatcgaatgagatgcatctggtgattatatatattgaaaaaatctagtgttaattgaaaatattttcctattaatatttctttttttttgaaaaagaagaaaattaacaaaataaaaataagaatataagtttaatatattctatatattattttccaaaattttacatttctctttttcatatattattttttccgttttataaatatctttgtacataaaataataaaattttaaaatattaaaaatattcagtgtggttgctaaccatgactggtcgttttaaatctcatgtagacgggcctaggggtgtcaaaatggatcaaaattcatgggtcaactcaactcaactcaactcatgaaccctaatgagttgaaaatattaactcaaatgagttgatgggtcaaatgagttattgagtcaattggtttgatgaataaaatgagttgggttgtaatggtttacccaattaacccatcaagttttgtaaaaataaattaaaccaactaaaatctctaaaccaatgccgatttaagtttaaccaacacatctaaaccaatttaatacaatcaatatttttccgaatttcttaaatatataagcaatgaaattgagaagatttaaactcgttgagttgagttgggttacccattttgacacccctaagacggccttaaaagcttatcacttcgactttttttttttaagttgtaatagaatttttttgtaataaatatcttattttctaaactaataaaattttaaaataaatttaaattatttatattttcattttatgaattttgtaacataattatattcagaattctttcatatttttagatttttcgtttataaatttaatatcttattttttatttcttttattggctttttttttaatttttacaaaaacatttgaagagattatttttagaagttctactttttttttctttttttttttacttatgttttctttaaaagtttatatttttttatatctattgttatttttccttttttaaagtatcttaatatagttgtcgaatatgaaattatataatcagttattaatcctacaagaaaaaaagattttaaatactcacatctatataaaaaatatattatcttatattttttgtcactaaacaaattaatttcttcataaatactccactattaagtcaaaataattctgaaaataggcaaatatccatgagtaaaaatgaaactaacgtcaaacaaaagacaaacataaaacaacatattgtaatttggagcaaaatatgaaacaaatactaattgcacaaaatccaaaaaaaaaaaaatcaatactggaatattattgacttaagagagtaaacgagaattggcttcatatcacttttataaataattttcctcaaaattggctcgttgttgtcttaaataatagggagatttgcaaaactaaccttttttactacccttttaaagacaacgggaatgaaaggaaaaacaatgtcatttaataaaataacatgtcacactacaaaatatcggagtaacatgtgattgttatgtatgtgacgatggtggttgttgatggttacggaggtggtgaaaagttattataagggaaacatatcttattatataattaatatgttgtgttcatttctcaaagttagtaattaatgttaacatgaatagttatcaatcaaagattttatcatgtgtcgtgatttaaagagatttagtcaactttgatcgatcatctttatatttttaatatgtctaatttataaccattttggtttcattcaaaaactttatgatgaattaatttaattttagttttttcatataagtataccaagagttattgatatgagatatatttttcattcaaataatttgagttattactatatgatattgaaagtttttaatccataattttagtagtaagaaaacaatacaacagtgaaaatttgaaaaataaattaatttttaagagataatttacacttacaattttgttaattatatttcttttttgttaaatttgattttagttataagaaagtaaacacggtccttatctagtaaacacataaactgttttcttcaaaagaaaaatgaatagttttaagcataattataagacataagcagaagtttaggagaataaaaggatcttaggcagcaatggtagacgtctaagcatccaagacattctcaaacttgagttctccaacaacaataacatctctttgcactctttgttcataaacaaatccagcgcaaacatataaagatcactacctttctcaacctcttccatggcgtttaaacacttcatatatgcattccccaatggtatactcgtactccttaaccaatgcacttgatggaatattctcaaccacctcgatattgatcctttgacatggcgcaagagttacagtttccacatcttgtgacttttcaacaccaacaccattaaatataggctcatgattgtcatcatcatcatctccaccttcaattcctgcgactgtctcgtttatgtctagtgttaatcgaatatatttttctattaatatttcttctttttgaaaaataagtagattaacaaataaaaataagaatataagtttaatatattccatatattattttctaaaaatttacgtttctctttttcatatattgttttttcctttttataaatatttttgtacataaaataatagaattttaaaatattaattaatgagatgactaaaaatattcaatgtgattactaactccgactggtcgttttaaatctcatgtacaaagccttaaaagcttatcacttcggcttttataattaaagttggaatagaaaatttttgtaagactaataatgattttttataataaatatcttattttctaagctaataaaattaaaataaaaaatttataatatttttgtattcatttgatgaatttgataacaaaaaaaattatattcagaattttttcatattttcatatttttcatttataaaattaaatttttttacgaaattaaaactttacattttgattacttttctattacgtttttaataacaaaacattattatttgaaatatatgcatatttcaaatatttcttttattggtttattttaaaaatttttacataaaaattgaaaagattatttttaaaagttctacgttttttttacatatgttattctttaaaagttaacatttttttcatatctattgttattttttctttttaaatgtatcttaatacagtaatttataaattttaaatgttagttgatgcaatggctactccttactggttgttttaaatctcatgaaaataggcaaatatcgatgagtaaatattaaactaaccttaaataaaagacaaacatataacaacatattgcaatttgaaggaaaatatataataaatactaactacacaaaatccaaaaataaaaacaaatcaaactggaatattaacgacttaagagagacaatgagaatgaaaggaaaaacaatgtcatttaataaaataacatgtcatactacaaaatataggagtaacatgtgattgttatgcatgcatgtgacgatgatgcttgttgatggttacggaggtggtgatagaaaaagttattttaagggaaacatatcttattatataattaatatgatgttttcgtttcttaaagttaataattaatattaacataaatagttatcaatcaaagattttatcatgtgtcgtgatttaaaaggatttagtcaactttgatcgatcatctttatatttttaatatgtctaatttaaaactattttgttttcattcgacaattttatgatgaatatttttaattttagtttttccatataagtataccaagagttattgatatgtgatatatttttcatttaaataatttgagttattactatatgataatgaaagtttttaatcaataattttagtagtaagaaaacaatacaacagagaaaataaccgaaaaataaattaacttttaaaagataatttacacttacaattttgttaattatttttttttgttaaatttgattttagttataagaaaataaacacgggtccttatctagtaaacacataaactattttcttcaaaaaataaataaagagttttaagcataattataagacataagcagaagtttaggagaataagagggagtgtgcttccatcctgaccaggatagaattatcagtgttcgtgaatgcgcctgatctcaggtaataaaatctctaatgttccttccttgttactcatctagcatcaatataagtgtaaagagtttttgttttggaaattgaagtaatgttagcttatgaatatagctctcttaagtgaaatggtggttttataaaaaaaattgcaggggtttccggatagctataagtttccagaaaatataaaagacaaacataggcaggttgggaatgcagtccctccaccattagcgtttgctcttggtcggaagcttaaagaagccctacacctcaggaattctcttcaacaccaatcgtaaaaaagaacatccaaatctatatataatccaaatgaatgatagattatattgtcacttcattttattttacaagtaaaaccctcttcttgaaactcaaagtcattggtttaggataatactatagaaggatctagaatattctctagtatatttgttaataattactatagtttgtatttaaggaaactagattaattaggttaccgttctattctctatataaacatatatgtaactattattgtatctcttatgagggtaaatataacttcttttaattcctaaactctcatcacattatcatggtatcagagttacaatgatctaatctaacgatcggctttgttcctgaatctatggcaaaaacttctttcttttatttttgtgttttagcggagtgcttccaacatttatttttgtgtttaagctgagtgcttccaatattcaaattcatcatgaacctcttaatctaagcaaaaatgcttccataattcaagtctaatcatagacctctgaatcaaatctaagtgctcatttttttttatacaattaagaaaagattttaaaaaaacatctggttatttttcggtttcttaagccatggagcttcgttaataaagagtcatgagacaaacggtaacctatagaagttctacttttttctttttttttacatatgtttttctttaaaagttaacatttttttcatatcctaatataataatttataaatttaaaatattagttgatacaatggctaatcatgattggttgttttaaatctcatgacgccctaaagagcttatactctcgagttttaaaccataaataattaatctatgaaagtaatgattatcgagctaaacgtattttgtacatcagttttagatgagtatttatacatcaaccactattttagaaattagaaacttttctattttctattttaccgattagtagaatttctctttcttattgtagaaagtttcttgactttagatgtatttttcctcatctgttaataggttcttccttatcatttaaactaaagctaagattaacatattttcaggtttttaaatttttctataaaacatatttgaatgagttccatatatgatttgacatttaattgttttgggaacttaacatatattcggttgtctaaaataagaaactcggttgttattttccttttttattttaaaatagaaagtaacatatgtttagggttagtataagacttggtatgtatgttttgtataatttatctaatataatatttttaataaattcaactaaatatttatgtaaaattgggttaaatgtatatgaaataagatagcacctaaacatgtagtagaacaataaacaagagctataagtataatagaatacaacaaatataaaatgctacaacacaatataatacaacattaaaattgaactgcaaaaatgagaatcatatcacataatttacgctatgatatgtttacataacatagcataggaagaaaacgctattgtatgtgaccgacctaagaaagctccggcaaacacagcgtttatgaatccgctatgtaaacaatattatagtgttttctgtgtgttaagaacgcccatatttcttgtagtagaacaggtgagagaaggtgaatgcaaagtttgaaaaaacaaaaatgcagatttattaattcaagagttttgatctgatttgattcattaataactatatcatctatgacactgtgaacaattgtttgtttcaatatgttcatattgtccatgtactagtctactggattcgaacaaatggatgacttaaagaaccaccagattgaataaacacaaatgaaagtaggtttggataactgtatatgctttgtgaagaccatatgtattgtcggctaattgaaaatcatcaaaacttgttgcaggcttgggaaacaatcacaaccagcaataccataatatatttaaggttctctaaacactttcagatcatccacttagattcggtcataaatacttgtccattaacacttgtccataaacacttgtccacttagatgatcaaaggatattgcttagatcaagttcactaaacacacttaataacactgagatagtcaacatacttgctatcatccatatatacaatctttgatggacatcttacttgtcatgttcttctcttttatttgaatcggattagattagaacttttgaattaatacatctgcattattgttttttcaaggtttgcattcactttctttcacatgtttggatgatcagtagttataaatattggtataatattttgtttaagtaccttttaaagttcatttaatagtaaacaaatgttcagtcggaaatggataaaatgtcatataattatttacttaaaatatagcaacaatggatcttaaaatgtaggaaaaatgaaatcttaatttattatataaaaaaataggtaaaacactttagggagatttactcaaataaaatacaaattaggtgtaattacaagaacagacataacttttttttattactgccatattttcgtctattttttatactgagcgtgcccctactaaacgttacaggaaaaaacgtaattacaaggaataccactgccacgtcagaaattactgacgtggattaaatgaactcagccgtaacgcgatacaacggtagttacggctgagttacggtatgttgcggctgacttacgacaaaaatatatgagtcataacaaaacggcaaagtataagtacaactcaaccagacgttacagctgatttgtaaaatgttgtctgtgttatacgataacttaggcaacggaatggctgagttaaggaatgttgtctgaattataaaaatttatagcataatccagacaacgttatggctgagttatgaaaaaaacggttgacttatttctttgacacggctgagttatatttttggacggcttagttatgggatgatgtgacggctgagttatgatcgagtgttataaatcagccgtgaagagttggattactaaataactcagccttgttacgactgacttatgtgcaaaagattaattactataatagcatgcagtaatggccgagtttgtaaacgttacggctgagttagttgagttacgacattacacggctgacttaactttgtttttttttcttttttaattactgtaatagtattcatgttgcgactaacttatagatttgcttgatggctgagttatcaaatgttcgtttggtgacttacttgccacctcatcaattcaaaacgatgtcggctgtaatattccatgtcatcattccatgtcagcatcatcaaaggataaaaaaaatagggccaaatttttttaactcgtcttctttatctgagtttttcacatcaccggaacttctaattcctcatcgttttcctcattcttcttcaatttctttcatccttctcccgatatgattgatccggttccttaaccaatgcacttgatggaatattctccaccacctcgatattgatcctttgacatggcgcaagagttacagtttccacatcttgtgacttttcaacaccaacaccattaaataccccgtgatgcggagtaggctcatgtttgtcatcatcatcatctccaccttcaatcgaatatattttcttattaatatttcttaaaaaaaaaaaaaagtagattaacaaataaaaataagaatataagtttaatatattcgatatattactttccaaaaatttacatttctctttttcatatattgtttttttctttttataaatatctttgtaaataaaataatagaattttaaaatattaattaatgagatgactaaaaatattcaatgtgattactaactccgacttgttgttttaaatctcatgtagacaaccttaaaagcttatcacttcggcttttataattaaagttggaatataaaatttttgtaagactaataatgattttttataataaatatcttattttctaaactaataaaattaaaaaaaaaatttataatatttttatattcatttgatgaatttgataacaaaaataaattatattcagaattatttcatatttttagattttttgtttataaaattaaaaatctttacgaaactaaaactttacattttgattacttttatattacgttttcaataacaaaacattattattggaaatatatgcatatttcaaatatttcttttattgtttttttttaaaaaaaatttacataaaaattgaagagattatttttagaagttctacgttttttttttttacatatgtttttctttaaaaattaacatttttttcatatctattgttattttttctttttaaaagtatcttaatacaataatttataaattttaaaatgttagttgaaaaaatggctaatccttactggttgttttaaatctcatgaaaataagcaaatatccatgagtaaaaattaaactaaccttaaataaaagacaaacatacaacaacttattgtaatttgaaggaaaatatataataaatactaactacacaaaatccaaaaataaaaacaaatcaaactggaatattaacgacgtaagagagacaatgagaacgaaaggaaaaacaatttcatttaataaaaataacatgtcatactacaaaatataggagtaacatgtgattgttatgcatgtgacgatggtgcttgttgatggttacggaggtgatgatagaaaaagttattttaagggaaacatatcttattatataattaataggatgtttttcgtttctcaaaattagtaattaatattaacataaatagttatcaatcatagattttatcatgtgtcgtgatttaaaaggatttagtcaactttgatcgatcatctttatatttttaaagaataagagggagtgtgcttccatcctgaccaggatagaattatcagtgttcgtgaatgcgcccgatctcaggtaataaaatctctaatgttccttccttgttactcatctagcatcaatataagtgtaaagagtttttgttttggaaattgaagtaatgttagcttatgaatatagctcttttaagtgaaatggtggttttataaaaaaaattgcaggggtttccggatagctataagtttccagaaaatataaaagacaaacataggcaggttgggaatgcagtccctccaccattagcgtttgctcttggtcggaagcttaaagaagccctacacctcaggaattctcttcaacaccaatcgtaaaaaagaacatccaaatctatatataatccaaatgaatgatagattatattgtcacttcattttattttacaagtaaaaccctcttcttgaaactcaaagtcattggtttaggataatactatagaaggatctagaatattctctagtatatttgttaataattactatagtttgtatttaaggaaactagattaattaggttaccgttctattctctatataaacatatatgtaactattattgtatctcttatgagaggatatataacttcttctaattcctaaaatctcatctcattatcatggtatcagagttacaatgatctaatccgacgatcggctttgttcctgaatctaaggcaaaaacttctttcttttattttggtgttttagccgactgcttccaacattcaaattcatcatgaacctcttaatctaagaaaaaatgcttccataattcaagtctaatcatagacctctgaatcaagtctaagtgcttattttttttttatacaattaagaaaagattaaaaaaaaatctggttatttttcggtttctgaagccattgagcttcgttaataaagaatcatgagacaaacggtaatctatagaagttctacgtttttttttaacatatgtttttctttaaaagttaacatttttttcatattctaatataataatttataaattttaaaatgttagttgatacaatggcctatcatgattggttgttttaaatctcatgacggcctaaagagcttatacgctcgagttttaaaccataaataatgaatctatgaaagtaatgattatcgagctaaacgtattttgtacatctggatgccttctatgatattgaattcctttctatttaggtcatgaggattactcctttcagtgcaagtaacaacaaatctcaagaaatcaaagaagtgaagaacaaagagaaaaatgaaatttgtatcttagaactgacggatgtgtaaatttcacatgtaaactacaattcaagtaaggagaagattgttaaacttataaaattttaaccaatccaaaagcagtccatgcaaattaaaaacgaattgtactggtacttaaacacttttactaaacacacctgcaaaagctcatcttccatccatggcaagcattccaaagctcatactaacaaaattggcacggtatagtcataagaaactctctattttacagtttcatcaggatggacatacctatgcaatctagacatcgttctcgatttagagagccaccagagatgataatgacttcggagcaagcgatttcagtttttttcctgagcttcaaaacagattcgtgtgttttagaaagtaaatatacgttagggtttctactttctagcagtaagaaaaagggatgtaaattcatgacaaaatacaaaacatagtttagattagagactgactttttttacgatgaaacaaacacgctttgatgattgtatgtccacatcattgtaacgtgagaggtaaaaaaaccatattaaaaaacaaaattaaatgcaggaaaaaaaacatgaatgcagtgacaactaaagaacgatcggaatggaggtccctaggcatattatttatagtgtgagatctaggtctaaccgaacagttttttttatttctatatatactgattttttcctttatacaaaaaaacttaatatagaaaactataactttgaaaatgtcaacaaatgatatggctaatcaagattggttgatgagcaaaagctcgagccccataagtaagtcacctttcttggggtttcttgctttccatatgtggatgacgctaacaacaacttctttgctagtaaacacgtcttgacaactcatcaaaaaccaaagagggaagtagttgagcggaaggagaagaatttgcatgtgacatcttaattcaacgaattgttctctcaatgaactaaaactctctttgattttttaatgaactaaaaacgttatttgaagtttctatgttcaatcatcagttttagatgagtatttatacatcaaccactactttagaaattataaacttttatattttccattttaccgattagtagaatttctctttcttgttttagaaagtttcttgactttagttgtattttacctcatcttttaataggttcttccttatcatttaaactagggaatttaatgaaaaaaaccctcaactttggccagatccatttttaaaccctaaactatgtttttagtaaaacaaatcctgaactaaaacctgttaataaacttaaccccacagtaattaaatattaatgggatattaatttccaaaaaaaaaacaacgagacatttgtatttagcgcaaaaaccacatgatgttctttaaaactgttttgaatttattacaaaaaaaacgttctaaatgattttgaattgcttaattagtttggattttagaagctgaaagaaagatacaacaacttaaaataatccaaagagtcatgcttaaataaatccaaccaacataactatcgaagctgttgcaacacaacaatatttgtcacaaaaaaaaacaatcgtttcagagggacaagatattctaaagtaaagacttgtcaagcattaactttgaagagaagattgtattggctgagtgatagggttctcttcatccattgttttctgttttttccttggtcgtccttgaggtttcttgggtggttttggcactactttacgcttgcatgaacgtttgttgtgtccgacttgttgacagttgctgcaagtctaaatatgcaaagattaaattaaataatttgaaaaggaagatcttgtgaaacataattcattgttctctattttaccatttgaactttttcacgtgtataaggaactttttgaggtggacgatcttcagttggatcacggattctgtcattgttctttggtcgatttttggaaattaatatcccattaatatttaattactgtggggttaagtttattaacaggttttagttcagggtttgttttactaaaaacatagttcagggtttaaaaatggatctggccaaagttgagggttttttttcattaaattccctttaaactaaagctaagattaacatattttccttatcatataaaacatttttgaatgatttccatatatgatttgacatttaattgttttgggaacttaacatatatttggttgtttaaaataataaactcggttgttatttttatttttattttaattttaaaatagaaaagaacatatagagttagtataagacttggtatgtatgttttgtataatatatctaatataatccttttaataaatttaactaaatatttatgtaaataggattaaatgtatatgaaataagatatcacataaacatgtagtagagcaataaacaagagctataagtgtaatataataaacaaatataaattgctacaacacaatataatacaacattaaaactgagctgcaaaaataataatcatataacataatttacgctatgatatatttacataacatagcatagcaaaaaaaagctattgtatgtgaccgacctaagatagttccagcaaacacagcgtttatgaattcgctatataaacaatattatagtgttttccgtgtgctaagagtgcccatatttcttgtagtgaaacagatgagagaaggtgaatgcaaagcttgaaaaaacaaaaatgcaaatttatttcaagagttctgatctgatttgattcattaataaccatatcatccatgacattgtgaacaattgtttgtttcaacatgttcatatcgtccatgtactagtctactagattcgaacaaatggatgacttaaagaaccaccagcttaaaaacacacaaataaaagtaagtttggataactgtatatgctttgtgaaaaccatatatatcgtcggccaattgaaaatcatcaagacttgttgcaggcttgggaaaccatcacaaccagcaacaccataatagatttaaggttctctaaacactttcagttcatctacttagtttcggccataaatacttgtccattaacacttgtccataaacacttatccacttagatggtcaaaggatattgcttagatcaagttcactaaacatacttaataacactgaatagtcaacatacttgccatcatccatatatacaatctttgatggacatcttacttgtcatgttcttctcttttatttgaatcagatcagatcagaacgcttgaattaatacatctgcatttttgttttttcaagctttgcattcactttctttcacatgtttggatgatcagtagttataaatatcggtatagtatatttgtgcaagtaccttttaaaatccatttaatagtaaacaaatgttcgatcggaaatggataaactgtcatataattatttacttaaaatatagtaacaatggatcttaaaatgtaggaaaaatgaattcttgatttattatataagaaaacagacaaaacactttatattaagtaactaaaataataataagagagagaatgagagagagaaaaaaaaaaagaggaccgttatttttgaaagataaaagtgtatggtatgtagttgggggcgtttcggtaataacacaggaaaaaaattgttttggaagatgaaagtgtgggagtgtaaaatgaaagatgaaaaagtatgtgagagtgtaaaatgtaaataactcaaaaacaaactagagttctatgtccattgtttctctcccattatcttcatcattcccacagcatgtccaaagctttatggtgcggtcatgcgaaacacttgcgagacgagctatctacagcgatatcaagagatgcgacttttgactcatgtcctactaagcttttaacaagcgagaaatctctacctgaccatatattaacgttcatgtcgtgtgaggcagtagccaggaaatagcgttcttgtggttcgtactttacttgagaaacgaggttcacatgagctggtataatatacaacaactttctcatccgtagatcccaaatacggcattgattatcttcaccaccagatgccaaatgataaccattaggagagaaatccaccgagagaacctgtttgatatgtccttggaagataagaatattcctagccgtacgaagatcccaaactcttgcaagcgaatcaaaacccgaagaagctactaatgatccatcttgttgaaatgcaattccgtagacactacgactatgaccttcttgtgttaaagcatctcaactcctatgtttatatcccacaatctccatgttttatcaaaactcgttgtccggaggcatctcaacactacgactatgacgggtggaatgcaatgcgtgcaagacgatctgaatgacctttaaaagtttgtagaagtgttccatccgttttccatatcttttcagttcgatcagtagaagcagttgctagacattcatcatccacagacgagaacactacatcagttacatgttctttatgacctttcaagacaacaatcttgtttgtaacttgaggcacctcccacaatttaggaaccccactaagagaacatgtgacgagtatttttccatctcgtgataaggagcaaccagtaagaggacgatcatccccaaatttactagaaccaagaaccatgtctttacaatgctttaaagccaatttagtctcagcatttttatcttcatctggatcattccttcgccgattttcacgctgaatccttagagcagctctctttataaaatctttggtaatttctattctagcctctctaagctctgttggacccattggtataaacaaacttttgaaacaagatctagaagaagctcgtgacaagactagttcacttagaagacaagaaggtttggcttaccaaagctcttatttatagcaaagtaaacgagatggatcagaaagaaagaaaggaaatctattaaaaaagtgggttattggggttagctttgaattgtgatttgtctcttaagtctaaattcgataggaagcagtatttttatccagatcttcttcaaggttatcagatttggatattcctcttgagtttggtggtggacataggagattttggtattactagggttcatatggaagaagatgctggcaagttacttcattcagacacaggagattactctcaggttcatatggaatttatgacaagtttcagtttggttttatcagattcttgtattggttttaggcttcagctgcaagatgtttgtgtttcttatgtattagttggttactctaatggtgcaagtagatttgaatagagcaggtgttcttgaacatgatctgagaattggtatagatgctgctgaatacgcttgtgaaatgcaacagattgcgaggtctttgggagtcagtaatgggaatatgcaagaaggctctcttattccttttcaaaaacaataatattcaactcttgcaagttgcgaaacatgggagcctaagcgtgtaagaataacccactgaaactcatatattgcatgagatcactcaccttttaacctaatcctagacagacttatctgccttttaaaaaagacattttaaaacagaaacaaacactcttttattttgctccataacttgtgtattgcttccttcactattgcttgctcaagtttctgataacatatggaagtatgcctccatggttaaagtatgccaattccacctgcacatttattttaccattattagttccttcacattgaaaagctttttttcactaaagattggagtatttagttacctctgtgtcgaagcggactgtgcaagtgaaagattttccgttgtcggtagtgacggtaacatcttggccaggtcttatctctgagatatcggttgggagatggatcgtgtagcgttcgtgaccagtcaatccaagagtatctgcgtcttcaccggacttaaagcacaatgggatgattcccattcccaccaagttgcttcggtgaatcctctcaaaactctttgcaatcaccgctttaacaccctgacaatcccaaacttgttgtttcagaataaaacagtaagattggtttatgcggaaagaaactagagaagcggttctaaacctgtagcatgggtcccttggcagcccaatcacgtgagctaccacttccatactcagctccagccagaataattgtgtcttcaccagatgacttgtacctctgatacatttgacattatgataaggagacattcgacatgatcaacatacagtcagtaatacaaattttaattagataaatacaaaccatggcagcgtcaaagactgagagcttctctccagatggaatgtgaacagtcttagggccaacttcaccattcatgagcttgttaacgatacggatattagcaaaagtacctctggccattatttcatcattcccacggcgacttccatatgagttgaagtccttacggtcaacgccacgctccatgagaaactttgcagcaggactgtccttttggatgtttccagctggtgagatgtgatcagtggtgatactgtccccaaaattgagtaaacagtaagcatccttcacattgtgtggaccaggaggatccatggtcatgtccttgaagtatggaggctcgtgaatgtaagttgagttgggatcccatgagtagagggtattctcaggaacagacagcttattccacatggggttacccttggtgattgactcgtacgttgctcggaacatgtcaggcaaaacactggattgaacaacctgatccatatgtcaaaagattagtttaatatttgtgtataaaaaagatgttattgttctctggttaagtcgtatatacctcagcaatttcttccgtggttggccagatatctcttaagaagacgtccttgccattctttcctttgccaataggctccgtttcaaagtcaatgttaacctggaaaataagaaagaagaacgccaaaattaccaatgtgataatcagtcatgtgtcattatctcatacaaaatgtaagttgaactttgacaagttctcaagatttattaccgtgccagcaagagcataggcaaccaccaacggaggagatgcaaggtaattggctcttgttagtggatgaacacgcccctcaaagttcctgttaccggatagcacagcagccgccacaatgtctaaaaccaagcaacacaaatattgaaaacaaatcagctacttacttatatataatagtaatataaaggatggaaagtccaaagtaagtttagttgggaatctcaataataccattttcggtaatagcagctcccactgattcattaatttccccagaattcccgatgcatgtagtgcacccgtagccgacaatattgaaaccctgttcattcagatattcttgcaatccactgcatggagtaagatgttacacttaaatttaccatcacataagaaagaattagcctttaacaacgaagaactagataaaaatacgacatacctctttaataagtattttgtaacaactcctgagcctggagcaagacttgtctttatccaaggcttaacctacagaggcaagtttttgaaaaagggatcagaaaatgtcgaggcatcagatagatttctagtttgctctcgtgaaaccaacctgtagcccaaggtcacaagccttctttgcaacaagaccagcaccaagcatgacgctgggatttgatgtattagtacagcttgtgattgcagcaatcaccacacttccatgtttaagctctgctggttgtccatcgaacgaaaaatttaccactttttcttgtgcctctttaggtatagcaaaaccctgcggagaatgaatagcaatattcagaaataaacattgatttccaaaatgtgcaccaacaacccagtctatagaacgagtaaatggttaagagattagacatccacaaagtgaaacatccagttacataccttgaacccaactttactgtcaagacatgaatgccagtcagctttcatttccttcaaagtaacacgatcatgtggcctgcaaagaagatatcaataatatggtcatgaccaattattcagacaataaacttcgcgattacaaaaaccaacagaacccataccgctttggtccagaaatgcaaggttcaacatcatccagattcagttctagatatgacgagtaaacccggtcttgctgaggctgaaatttattcacaagcaaagtcaaataaaaacctgaaaggagattaagaaacaaaaaaagaaagaaagtataaggctaatttacctcattgtagtcaacaaacatattgttagcccgaagatatgcttcaatcatagccacctgccatgaaagtattgtatcagaccagatatctgaatatatatagaaggaagattaaagtcaaacactcactgtctcatcgcttcttccagtcaatttgagatattgtagagtaacatgatccacagggaagaagcccatggttgcaccatactcgggagacatattggcaattgtcgccctgtcagctagggacagcccactcatgccattacctaagaagaaaaaagtagacttataatgctccaacaaacacatgtctattataaaagagcaaaacacttaagagctcacaaggatataattaccataaaactcaacaaactttccaacaacgccatgcttcctcagcatttgagtcactgttagaaccaaatcagtagctgttacaccattacgcatttttccggcaagtttgaatccaacaacaccaggcaataccatactcatgggctgtcaaaccaaaaaagcgttatcagtataagaaaaattcacaaacctcactgtattggagcagaagagtcataaaatatagtgatctaatctaaaattcagtaaagttgactccagattaaccaacatctgatgtgcgtcatgtaaataatcaaaataatttacctggccaagcattgttgcctcagcttcaatacccccaacaccccatccagcaactcccaaaccatcaatcatagttgtatgtgaatcagttccaaccacgctgtctgggtagagaaggcctttggtattgaacacaactcttccaagatattccaaattgacctgaattttcaagatgaggttagtttgagacaaacttcaagacagataaaagaagataataaatgaaaagaaacatttcaatacactggaaacatgaggttgaaaaggatatatatcaatgtcagaacaagtttagaaacaacttatggactcgcacactttaaaaaagagaattacctgatgcacaataccagagccaggaggcacaacaagcatgttctggaacgcagtagaaccccatttaaggaaagcaaacctctccttgttcctctggaactcaagctccatgtttgcttgcactgcattctctgatcgagctacatctacttgaaccgagtgatcaatcacaagatccaccggaacctgagagacacagtataacataagaaatctaaaagaaccctaacctaaacaaaaagcatcaatctgtggcaaacaaaaacataccaagggattgattttgttggaatcacttcccagcttattcatcgcatcacgcatacaagcaaggtcaacaacagctgggactcccgtaaagtcctgaagaagaacacgagctggtttaaaaggaatctctacttgtttaggagatgtcttttcccagtcaataatcttctcaacatcttccttagtaacttgaaagttatcacaattacgaatcgcagattcaagcagaatcctaatagagtaaggaagtttatctgcaaatacaacactcctcttcagattctcaggtccttcataaactcattcaaagagagattcaaaaaatccataccaactcgtggatcgttaagagcaggtaagctatagaactttccgaattcaccaccaccaggcttaggaagtgtagtgaagatccctttaaacggatgctctgacgctgaaacaatcataatcacaaaacagttactactaatcaacagagatcggaataaaaaactcaagctagatcaatcagatcgagatattttacccatggaagagaaggttctctggagacgatctaagactggagaaacagctctgatctgagaggtgaagcgaaacggagatggtttcgagtgaaaggaatggctccagcgacggaaagcaggggaaatggtaccaaaagatctacgagcgagaagagacgacggagaagtagatgaaacggagggagataaaaccgatcggaaagagaaaagagaagaagagcgagaagaagcagctcggatgatggaggaagaagcggaagatgaagcggttaaatacatgatgatgaaatcacgcttccagatgcagattcagatactgacagagaagatgaagaagataaggttattgattgatcaattgggatcgatcatggaggattttgaatctgacgtcggagtgatgaatgattgaagaagcgagagagagagagaggcgtgtggagacgaaacgaaaatgcctagggctgcgtgccaataagtcaatcttccctctctcgcaagggaatatttttttttgtttacggtattttttggattttaatctacgcagcccctctcctccacataatttctatttagcccctattattaaaataatatatatttttatttattttaatttaaataattacttaaaaatcaaataaatctcataacatttttacctgtttgaaaaagacaacgtaatatatagtttcttaatatataatcatatatatatgaaaattggtcaacactctccatatgaatgacacaccatcacacaaaagcatcacacaaaagtttgacatatatcattctatatttttaaatttaaaaaataataaaattaaaggtaatattagtagataaccaaataaaacatacaaattaagaaactagcagagataaagttttttgttacaaaataaccatggacccacgttgtcggaagaaaggaaataataaagctatcctttatttgttgtaagatgaaaagtaaacgaaacacatccgtgtaatttttcaaaatatcatgtaacattaaaatttcacatgttatatttagtttaaaaacatgctatttcataatacgttatgaatttttttttttaaaacattattatgaaattcttttacatgaacagaatcttaaaacaaaaattatatgtgattttaataaaaaccatgtattactaaaaaataagaatatttttaaagaaatcacgtgtgatctcaataaaaaacgtgtattactacaaaatatcatgataaaaagatatattaaactgaatacaatgttttttccaaaaaatagcatgtgctttttataaatactatgtaataagagaaaataacaagtgttctccaacatgtttccgacaagatactgtgactcaaggttagtttgtacattcttttcaaatctatagtcatttattataaatactctaaaattaaatgtatgattaatcctattcttaattgattcaaaataaaataaaaaaaaattatgttaataaattaagcactactttcattatactctttattttattaaatttttattatcaataatcactactagataatgacttttttttgtgttgtagttgtttgctaccaaacctcttattagtttagtatatattattctcatgaacatattttcgtcattagttttctaacgttgtccttcgcgattcatcattagttagaccgatacagatttcttatgttaatcttatttagagatctaaaatctacatatacatttttcagctactttaacaaataaatcttgtacttgaacttatttacaatgtcatgctattgacattaattattaataaatgaaatatttaattaaagatgtaaatcaaaattagtttggtaaaaattgctaaaacactggacacatctttactaatattacggcaatgatcatttagaaatctaatcatatatatgaaagttggccaactctttccatatgaatgacacatcatcacacaaaaaaatgacatgtgtcattctatattttttaaattaaaatattaatcatattaaataagcaaattaaatgtatcatcaatcctactcttaattgattttttcaagataaaaataaaataaaaaattatgttaataaattaagcactacttttattatactctttttattttactaatttttttgtgttgtacttgttcgttacctaacctcttattagtttagtaattttattttgagtctttgataacattgacactcaagttttttcaaataataaacctttaaaacgttagacttaccaaataatttaatacacgatcatttctcttatattgatatatgcaatgagagaagatctaaaagtattgacttaaatactgctttaatttatgcttttttttttaattcttttcatatgaatacttttgaaatcttgttcagtttatatcaattctatatatttaatcatgagtcgataacactaattaactagattttaacccgcggtataccgcggagacaatttatttccttaaagttagtatatataaaagtttacaaattttatctatctataaaatatttttattttatagtttacaattgttattaagtagcttcctgccaaacccgtcccgccaacccgtctcgtaaaaaaaactatttattttattaatgttgatcttatttatgatatgtttatgaatcattgtctaaatattttataattttgtagtaattaattgctatcaaatatctttacggtttgctgcttataatcgaattgttatagtcataaaaaaaaagcaatatcaaaaatgataattttgtagtatttaaatgatattaaatattttggaaattttattttagtaattaatcgtatagttaatgcagagagattttggaaaggtagttaaatgcaaatatttaattcgaagatttactttctaattatcaaaaacaattattaaatgccggtggcagccactgtaaataagtctcaacttgaagatttatttcacaaagtggctgcaaaaatgtatatgtagatttcaaataaaccatcacattatcaaataatcgtgcaaggtttgatattatggtcatattttgtattatttatttggtttattttgtattattctcacataaagaaaaaaaagttaaagtggtcatcgtgttataaaaaaaaaaaaaaagttaaagtggtcatgtttcattttcttgaatattatctactggattttgtgatatcgagtaaaaagttaccattttactgtaatttcgattttaatgtttctatgttggcaatgtcaattagttttgaaaaaatattcaatatgttaacccaaaaatcttaatgatatcaatttagagttatatgatgggacgggtttggattgatattattacaaatttatagtatcatcaacccaaagtaataacacggtttaaatgtaattttaatattttatcagcctcagtttctttttttccagcactaataaaaaattattaactttaatactaaataaaaaattatgaaatctaatattattatatttactaataaaaaaaaattgcacatcatatagttttgtacattgagaaaaatacaaaacaataggttatataataatattaattaattaagaaaattacagtttgattttttctagaaaaatatagtaccgcgggttaaaatctagtgctaattaagactacatacaaagataagagttatagaactacaaataaagtggcatctaagtagaaaacaaagtagaataaataaaaattacaaaagacataaattcttaaacaaaaatattgaaatgggcatcaaacacggagagcctgaacaaactcctgatagatgtcgacaacaaatctcatcctaagattctccacgacttcctcagttatgctctcgtggctaacgtattggaaatgaaggtctaattaattataagaccactctctcaaataagagatcgattgtagtacattagggtcgaattccacaaaactctcgaatcacacaatagactaatagtttcgaataagctaaacaaataagtaagaaaataaaataaaacaagaaagcaaataatacattatgaggatgtaaattaagataataaaagcgtcaagcttagggtattctcaggaaatatatgattagtagatctagaaatagctaggttgttatcaaaccgttcttcatttttaatcgtctttcttctttttcggtctaaaaactctatccaatagaaactctataaattaatactcgataaattaataaacacgataaattaataaattttgcaagtctcaagtcgggacaatgtaaaaattaaccaaaatcgataagataataagataataatttttttgaaatccctatgtaaaattatagtcccaataatattataaattaataatcatagattttaagtatatattttaagactaatttttatatgaaatttttgttcaagctacaattacaactctttttaaaatacaactagtatgatctctgttgtactcacataactatttgcgtatttgatccatcatattttattttgtaaaatcttttatttgagaaagtattgctaagatttgtgttagatctgggcgttcggttatcggatcggattaggttcgattttttcgaatttcggtttgtttggatatagattctaatatccatacggataattataaaattcggatcggtttcggtttggatattttggatttcggatcggtatggatatgatatttaacatccgattgaaaccgaataactgatattaatccgaacataaaccgaaaaaaccaaaatatgcaaaccaaaactgaaatgagtagatgaaatgaaaccatagcaaaccataaagttttgaaaccaaagtgaggcataaactatgccaatacatcaaagttttgaaagaaaagtaaaccataacatcctaaagagtaaagaagtagcaaaattcaattggaaagtagtaaaaaaaagtgaaagagagtgaaaacaagccaacaacagcaacctcaagcttcttctttgtcgcattctcaatctgcaccatgtccttgaactttgatacaacagaatacttaacttcttaatctatgaaagacatgaatcaaaaacatcaagtttaaaacaatttaccttatagccgactaatgaatttaaggataagagtcttctaagcagagttgccatcaaactctataatcaagaaaaacaagaaactcaaaactgtgaacaattaaaactattaagagggaattaaaatagagcataagggatgaatttacctttttcaattttatctagctcaacaatgtctgcaaggaactctttaatggtaacaacagatttatcacctaagtgattcgcattcttcatccactgctccgtgcacaacaacacttcaaccatataatgagttcatcaacttctatgtggctctatgactcgaccactgatactaaaagcactttcagagtcaaccgatgacacttgcattgcaaggacatccttagctattacagacaaaactagtaacctaccacaattgagcttccaccaagaaagtacttcccactctgttccaatgatagttttaggattctccactttctccttcaaatacacatctaactcttccctaccatcatcaaccctaatctcatcaaccaactccttataagcaaagcccatcctctcataccccatactatcatacatcaaatcagagggctcaccttggctagccgtagtcgaagtctgagtggactgtgatgatggaccactaccacgatgttttctgaaaacgactactatactccttaaacagagtagtcaaaacattgttgaccttttcagccatctctttagcatcagtagtatcttccccataaagctttgcaaaacacatattagcaaactgcattttcttccttggatcaaagacacttgcaactattagatagacattaatgtttcttgttccatcccaatacttaacaaaatttcctaacatagctttagccttagttttcagatccttgtctaaattattgcctagtgacaccaaattcgtttttatagtcactatctcaccatagcacttataagaagctactgaattagaagcagacacaaccaaagtatagttgtagaatatgaattagaagcagacacaactttctggtcaaatgaatcacaccttgaagttgaagacctcacatactgcactgcattgcgtatggctgccacataatcacccaattcaaccaaaccctccttgacaattaaattgattatgtgagcagcacacctcacatgcatacattcgccttctaaaacaaatgcttcattactccttaagctgaatgcttctggaaatttcttcaaagcagaagtgtttgctgttgcattgtccactgtgatagtgaaaatcttctctattcctcactcacccaaacactcaagaagaatccttgctattgttgcacctttgcgatccgtaatgtacttaaatccaatgattagcttccttaattgccaagcagaatcaacaaagtgagcagtaatcaccatgtaactagcagtcgtagctttagctgtccagatgtcagttgtcaaagagactcttggattaatagccgcaatccaagtcttcagagatgctttcattcccacatacattttaacaatgtctttcgtagcagttctcctaaaatgtggcgcgtagaggtttaccttgtcgcataaatgtttccaaaccgcgctttgaatgaaagaaagtggtaattctcccagcacaagcatctcatttgaagcctctctgaaaatctcctctgtaactttcccactctgaagctgtccctgattgttgataacagtttgattttgtttctgagtccatgcttgaaaatgcttgcagattcgaagatgattcttcaagtttgaagtcccatctttagaatcacatctgtaggttctgtgacaatagttgcacttgcatttcttagggttatcttcaaatctcgtttaatggtcccagacaaacgaccttgtacttggtttctttgacttaggtggttgtgaagtagctccaccatcttcatgaacatccttctttttgttagtagcattgctttcaggttcagtcactttctcattccccacatcactgttgcttggaaatggtgatgaatccatctaaacataagaacaatgagaagttaagagcatatcaaagtttttgaatgtcaatttggttacaaaatttcagctacaaacaatcaaaaatatacattcactaatcaaaaatttacgctcacaatgaaaacatacgttcactaatcaaaaatatacgctcacaatgaaaacatactttcacttattaaaaatatacgctcacaatgaaagcatacgttcactaatcaaaaatatacgctcacaataaaaaatatacgttcactaatcaaaaatatactatcacaatcaaaaatatactctcactactcaacaaacatccattgacacaacaagaggattagaatcgacaaagaatttaactccaacatacacatatcatttttaaactttcgtcaactgttactaaattaatacacatctccaagaagttgtgttgtgtacgtcgttgtactttgttaaatgttaagaaaacttcaatagatcgaatcccaaaccgacgacttagagagaacgaaaaaataatcattagctatatgactaaattaatttaactgagtaccaaatttttaaaatccaaacgaagaatttaactccaacataacaataagaaacaataatcattagctatatgactaaatcaatttaattgaggttgaaattttgtctctaatgaagaagaagaatcagagaacatagacgataactaatgaagaagaagaattgaagttcaaacacatacccgagatcgattacttgatgcttctgatagaggcgattgggacgaaagaaagcttaagaattccatattgaaagattaggattttatggttataagctagaggaaatggatcccgtattgctaggaaaatcaagaagattagggaagtggatcgaatccatattgtttgatagagaggaaaatcatgataagggaagtggatcccgtattgtaagggacgagtagggtatagaagaagaactattgatttgtttcggatacccgtattgcttcggttcggatcggataaaatccgatatccgtggatatagaaatcaataaccgttcggttaattgatcggattcggttcggtttttaatccgatttttccggtttggatgcggttcggattatgggattcggattaaacgcccaggcctaatttgtgtaaaaaaaattggattaagcttcatgtttacgtttacgttcacgttaatgtcatagatatacagacacaatattttgcagaaaaataaattatagaagtcaaagaaaaataaaaacctaatataactatatatgcaaacaacagagcatatagaaaattaaattaagaaacattttaagaagaatatagtattatattttacgtaaatatatatatatataaattaataatttatcatataaactaataaatattaatttataggataaattattaatttataggataaattaatatcactataaattaataatattttgtggtcccaacattattaatttatagagtttctactgtagtttaaataattattataagataattagtaatttacaaccaatttaatcatatttggagtgattggatgaaactaaattacttgctattaggagtgattaaagcagattaatgttttgaatttattaatatagaaagtatttttaggtattggatgaaattaattattctagtacaactgatttgtttgggtatagctatgtttcagggttttgtttgaatctagtattttggtatattgatacatttatgtatgattatgtttctgagttttctgggttttgaaaaacaaaaattaaaaaaaaaaatctggattttgtaaaaatctagtattttagtataactggtacgtttacctacaactatgtttctagattttgtatgaattgtagaattagtacaattaggcaaaactatgtttatcgattaatatataaacaaaattgatcaaatgaataataatattccaaaaataaaaatttaatttaaatatattaaaaatatgctcatttgaccacatgagaatagtcattctaaaaacaaattaaataataataaaattatactcatagttgcatagtaatacttggttgcaccaaaataaacataatagttactttattcgattagtaagtataatcatttgttcttggctttaaatcaatttttttgggtggaaccgattatattaggtaattaaagtacatttactatatacttatgtaattttatgtgtcaaattataattattgagggtatccataatttatggttcaaaaacacaaagtaatcatgaaagtataaggtcattgatgtaagttaccttacatcatgtaacaattcaaatttagttgatgtaaaatttcactaacttacaaataatatgtaacactattgtgtaaaatgcactgttgtgtatttaatagcccaaacacatcgttttgaggtttttatagtttttaaattttacattttttggtaacagtccataaacatagttgtaccaatttgttccagttgcaccaaaatttggatccgtaagtttgctcacagttgtatccaatggtatctagttgtctcaaatctttgatcccaaatttttctataaaattccgcattcaagctacaaatttcaactttttcaatcatatttaccaacgtgagatcttaacctattaagaaaacaattctattaactttaataaccattaaaaccaaacaaatttgcatgtttataattttttcaattccaattgaaattccacaataatttcattagttaatgttatatctaatgaaatttatgtcacattgctaatctagagaatatgaaaaaataaactaaaattactgaattgagctttaatggtggatggagaagaaaaagagaggagatatgagataggagaattcaaaatcttaagataaaagagagagatcccaaaatctaattgtttttttttgtagataatgagagaaaagagagaatgatttttattggttttttttccaaagagtgactgatatatggtataaattatatcgtataatacaatcatccagcaatgggaacccattttggagatgatttttattggttacatttttaatttgtttataattttattatggaaaaaggggtaaaattggtttttgataatatgaagaagcaaatggggtagtgagaataaatgggggtttttgaaagaacgtttggagaaaaagggggtgaagagattaaagtccttaaataaataagggtaaaattgggttttcgatcattgaataatacccttttagtaaactaggaaattgttaagttagtatgatctgacattgaaattctagttatttgttttttttataactaaaattcacttaaacataaaacaagtacggaagattccatagtaaatatgaatttatattttcaaatcattcatttagtttgtagaatattttctaaaaattcatattcgaataacataatattattctattctaatacaaattattctaaatcgtttgaatacatcattcttagttcctatgatcataacaataacagtaatggccacgcggcacctctacatctagacattggcaataaggaaattgtttttttccaaggctgtcttcgcataatggagcatcaacacaatttccatccataaatctaacaatgctatcctttttcttcttgttctcaactgtgttaaatcaggaaaatgttgaattgttgagaaaacatgttagataaacaatttattatgtaacaaattgtggaacatattttgctattagctatgatcaatatttttatattatccgagtaactgatcaaaatctaaagaagaagaatatattaccttcggcatgactcataacaaagaacacgaaaatacataaaaccaccaacgaagtagcagacttcataattaaaaaaattgataaaatattttatacgttttcttaaatttcttattttttcttgatctagtaatgaatactgaggaatgtattcaactatatattttgaattatttttgggtaaaattaggaaaaatgctacatttgttataatatcctcccaaatcccactaaaagaatgatatttgaaattttatcttctaatgaagagaatcttctttatataccactttagagtcaatatatatccaatgcttaaatggatgattggttgggttgtagttgtacatttttatgttgtagtgtttttgctatatatgtgctggcagtagctgtaagtgttttttctgtatctatcttattatataaagttggataatcaaagttgctaactcaggtgatcgcgacacctctcaagtttattggtatgatatcgatatatatcaaatctaattttgttaatatatataaaaacaaaaatataaaagttgctaactcaggtgattgcgacacatgtcaagattactaataagatatcaacacatgtcaattttgttttttaatatttaaaaacaaaaatacaaatctcctcactctatcaaaaaatatatatacataaatcaaaagaattttacctatatattttaaatagaagtaaatgttccttattttatttttaaaaaatattaataagtgttctgatattttgaatatatagatattgtttttgattatttatgtatgtatttctttcgataggattaggaaattatctaattttgttttctagagttacatataattcataaatataacggatttttttaacaaagacccgacaaatatatctatatatatatatatatgtgtgtattttgtcaaaaacaatttcttttgttttgtatagataacaatctagaatatatatgtcaaaaatagataaaattatgtgatttatagataaaaattataatgtaaaaactcaatagcatcggagatgaatgtgaattaagtgtattcatgtttgagtaagacgtttaggacaagttactaatactcaaagtctaagtcacatagaagtattaacttcataaataaataaaaagtaacttatttgatttaagaatatttagagcgagtagattaattgagataagagttagagcattaaatattgaaaaagtgtgttaacggataaaaattagattttttttttaccagtggacgaataagattatgttggatgtataagctcgattttgcatgagactttgattaatggcatattaagaggtttattagtccacaaagagaatttcgtcaagcagatttactatctccgtatattgtgtgtggatatatatatatatatctatatatacatttttgcaacacttttatgaaataaatcctagagtttgaacttaaaatttaattatttagatttaaaaattttaaaacaagatattgaggtcaacaaacattgccaatcggaaattctccatgttttctaacaaaaatatctattccgagattttttctatcaattaattactcccaataaatattttgaagatttactcagacgttatataaattaggtgtattcaccagagccatacaaaactttttttaattactctcatatttttcgttttttttgtatactcagtgtacccctactaaacgttacagaaaaaaacgtaattacaaagaatgtcactgccacgtcagaaattgctgatgtgaattaatgaactcagctctaaggcgatacaacggcagttacggctgagttaaggtatgttgcagctgagtcatgagaaaacgacggaattatgagtataactcagcctaagttacggttgatttaaaaaatttgtctgagttatgcgataaccaagcctacatgacagctgagttaaggaattttgtttgagttataagaatttcgggcataacccagacaacgttatggctgcgttattagaaaacggctgacttatttccttgacacgagtaagttacttttttccggctggctgggttatgaaggacagcttagttatgggatgatgttacggctcagttatgatcgagtgtcataaatcagccgtaaagagctggattaccggataactcagcctagttacgactgacttaggtgcaaaagattaattactataataacatgcagttacagccgagttattaaacgttacgactgagttatttgaggtacgacattacacggctgaattaacttggcatttattcgttttttaattactgtaatagtattcatgttgcgactgacttatagatttgtttgatggttgagttataaggcaaattttacatgttcgtttggtggcttacttgccacctcatcaattcaaaatgacaccgactgcaatattccatgtcatcattccatgtcagcagcatcaatggaaagacgaaacgtccctagcttttttaactcgtcttctcattcatcttcaatttctttcatcttctcattcatcttcaatttctttcatctttctctcgatatggctaatccggttccggtcatatttgtttccggtatttggtttaagaaacagagattcgtatataatctcgtcgaaagagggtgtagagttgtgcagctagaagcgaaaacaacgcacgataggcttttgaagttggtgctcggtgattacggattgaatcagaggacccattagttaaagctgagttacatgttctccaacaagactctgaaaaatatgccgcttgatactccaccagtttttgtctctaatgatcaacagttgcaatgttatccaaggttgatgaaaatcggccacctacgtctttgtgtggagtttacggcgaaagagccaaggggtattagtcggaaggacggatccagaggaaggatgaaacggccaatgggttctgactcaagagtagaatctagattcgaagttccgggtagggggtttgaagatttatgttaccattatcaagacgatgaggcaagtgacgatgaagcatgtaacgaagaagctgctgacgaagaagtaggtgacgaagaagaagaagatgatttttctagccggtttgatgttttcgacgactctgacggtgtctcatcagatgatgataactttactgtatacggtgagcctcagaaataaagatgaagattcaccgtaacttcctcctaagaagagaacttaaaacattgaaacgatcagatcttctaggaggtcggttgattcaaggttggagctgactacgctaacactcgctgtaggccaacgatacggtagcaaacgagttggagtatcgactcaaacttcttgtgataaggaatggatttgattttgatgtaccaatatcaaatacgactacaatggtttacgattgctgggttgatggatgtcgctggagagttcgtgcatctacacaaggggatgagccttatttttaggtttgtatatatgattcggaacacacatgttctgtgacggaatgttctaatcgatcccgacaagcaacacatgatattttgggagttctttacaaagactatcttggtgacgttggtccggatgttagaccaaaacctgtcagaataattatcaataagcattttagagtatagggaattccaatgtttcggctgacttactgattattgtttggccgacttatatatatatattacggctgacttatagatatattatcgctgacatataattacattctggttgagttatgacccttttcggctgacttaacatcactttgtggctgaattgtattacattttgcctgagttataaatatattatggctgacgctaaggttattggaagtcatacaagacgctaaggtttgcaaggaagctcaatctgggaacccctgatagtagttttgaagaactgcgttcttacctatacatgataagacgggcaaatccgggtacaatcacgcgtcttcaaattgatgagagcagaagattcaattatctcttcattgcttttggtgccaatatcgatgggtttcctttcatgcgcaaagttgttgttgtcgacggtacatttctccatggtagttacaaagggacgcttctaacagccctagctcaggatggtaatttcatatttttccgttagctttcggtgtagttgcactaaaaatgatgaatcttggcgttgttttttactcaactcaaagttgttatgcctgacgcaatggatctggcgataatctcggacagacatagtcaataaggaaagcaattggtgaagtgtatctgttggcttctcgtggaatttgcacttaccatttgtataagaaaattttggtaaaattcaaaggaaaacaaatgttcactctcgtgaaaaaagcggcaaggtgttttaggctgcctgattttagtgacgcgttcaacgagattgaagagcgtgatcctgacctacatggagacctctaaagagcgggtgttgaaatgtgagcacgtgttcattcccccggtgaaaggtacaatttaataactacaaatatagcggaatcaatgaacaaagcactgtcaaaagccagaaatcttcccatagttcgactgttagaagcgatacggactatgatgacaagatggtttgctgaacagagagaggatgcgagcacgcatcaaactcagctcacgcgtggtgttgaaaaaccgttacaggtaactcagctgtaactgtgtacataagtcagtcgtaggatgcccataaaccagacattatgggcataactcagccataacatatctgtttttttattcttttctctaatatgcccgtgtcaccgcttcaagacttatggatgtacaaacgattgatgctttccgcatacaagtagcttatggaacatctttgcatgttgtacatgtggatgcaaaataatgcacatgccatcgtttcgacaaagagaaattaccatgaatacatgcaatcacagctgcagagcatatggcttttactctatcaagccttatggtttcctccacatcttcatcagactcaggtagcatgcgattgtcttcaactagtaactggtctgtaatatcaaatatagaatcatcatgatctaccttcccaccgtcaatcttgtcagttttttccttgactttctcaactctattggggacagaagcaacatcttctatcttcacattagtatcaggtgttaacattcttagtctcacctttgtgagtggagcaggaggaagcgccgctgcctttcttcctcttttctttttggcggctggctctttgacggttggctcatttacggttttctctttaacgacagctttctttctttgaatctgccttcgctttagaatttctcctcgccaacgtcgaagtgcgtaaagtccgggcaccaggagacttctcaatgaaatcaatatcagcttggtttacatcagtggtcttaacaaattcgccatcaagattcctactgaccccacatccttctctaccaccaaatctacaacttcctttgactgcataaacgtaaagataactcaagcataaaataacgataactaagtcatatgtataatgataactcagttgtaactaaataagataataataactcagccgaaagtaagtaagataaagacaactcagccgtataacataacgataactcaaccataagtaaataaaaagttctaactcagccaaaagtaaacaaggtaaagacaacccagccgtataacataattataactcggtcgtaacttaataacataacgataactcagccataacataattataactcaatcgtaagtaaatagcgtattgataactcatcggttagcttacctgaggaggactagtaacagattagttatttggaggttttcgtggaccttttggtgtttattgattttgggttcgaatcatttcttgctcctcagctattaaaaacatatctctaattttcactctagagaataattatgagtcagctttaccactttggccagaaggcctaccccaatggccttcagatgctctttcatctatttgacctcattctcaatagatccaaacttgctttcaaactttgcatcaatcatcgcttatacttgatctccaatcacctccagactggaggacatttctttgatgcttgtatcaacaatgtcaaactttgagtttaagggagagattaatttagacaccacatccacgaaggaaacatcttcccgaacatcctcctcgtcctcgtcctcatcagattcaccatctacttttttcttcttcttcttcttcttttgtgcatctcctccaccagattgaacatcctcaccgtgagagactttctgcttctttgcgggagattcagacacagccgctgctttatcttttaagttttttttcttcttctcattcctcttcacatcccaataacctttaacaaacttatccccatgtatgtcttcgatcaagtgatcaagtgctgggtattctagctacttcatctgaccaagtatgaaacagctcgcttacatctacaacacaagagattataaaactcatcagtatgtttaaagtcagttatcaataagtataactcagccatcgctcaacaataattcaaccatcactaaaccacaactaagtcattgctaaactataacttagcaattaataaacaataacccaacaataaaaaaacaataactcagccatcaaaaaacaataactcagctaccaataaacaataactcaaccatcacagaacataactcagccgtcacagaacataacccagccatcacagaacatatctcagccatcactgaacataactcagtcaataactatcataacagagccaaaaccttacctcagcaccatacgctgtgatatcttcagtaatggccgattctattgttgcacgggtacggttgccaccctatgtaagcaacagaatctcatcctctttgactacgttcccaaatcgctgtccaatggtgttgattgaatcatacgcccaagcctgtaacacgaaagtcgtatccctgatggtgtacgacttgccaataggcctcaacatctttatagaaacaacaagggcttaaaatgctgactgaccccatggataaatcttcatggcttcgtcatcaaaaatcttttggtactatcaaatggtattctagagttaggatgcaagccataaagttcattggctagaagagtcaataacccaaaccatctacgcttttcaggaggccatgctctgcacactactaagcctcgcctaagttcatctaacttaggaccttcaccggtaggcacacccaattccctgaagaacgttttgtagtccgcttcaagctcaaactgttctgtagacagtggatctgtgtttaactccttcttcagtattcttaactgtctacatagtagataatgtacagtcttaccagaccaaacaaaatggctatcaactagctaagcaattaatccaagaggtgtctctttcatttgatcccatgtatcttgtcctattgattctgatcagagggaaatctcccatcttgatgttgtgattaatggctttagcctccagatagaatcttcctcttggtaaagtcttggagggtaatctcttgcttggtcttcagacatctgataaagcataaatcagccgtaagcatatattaactcagccacaacataaaacaaactcagccacatataacataactcagcaaaacataaaccaaactcagcataacaaaaactcagccaatacataaaacatactcagccacagataacataactcagccaacacataaaccaaactcagccataacataacaaaaacttagccaaaacataaaacaacctcaaccacatcataacaaaaactcagcaatggatgtaaggttaaaccacaactcaaacaaaacgtaaaacaaactcagtaacatatgcattgataaaccataactcaaccacatcatataacaaactcagacacagatgcattgataaatcataaattagtcagcaaacaaacagtaactcagccatcgaatcaattagatctaacaaatcatacaccatatgtcaataaccggcgccgaaaaccaggcggaataaacatcgttaaaaaccatcaataacatcgcgatagttttcggaaaacggtttcagtgacggaaatcacttgctattgaatttagatgtcggattcttgtcggaaaattcgaaataaagttaggatatagacttaccgcaacttagacaagttcagttcaaatgcgacttgataggtaagtgactttactaaactagaaatgcgactttgccgtaagaatttcggacagcacagacgagagaaagagaaaacgacaacgaaattagggttcaggaatcgttcccgtcgagagagagagagagagcgacagtttttttttccgttgatgaacagtaatgttcaggggaaaaccgaaaggtttttgcgggtttagatgacgtggattatctgagtaatgacgtggattgatgacgtggataatcaaatttttttatttatttttaattaaaacgaattaaataataatatttaataaaaatgaattaatatttaatatttaataatatttacacaagtgctaaaaacatatgagtaataaaaaaagatgtatgatattttaggaataaacatacaattctatgctatctgagtaattaattataaatattttccaatatttcttctccttgatatctttttaaaaattgattttaagaaataaagttgtgactgaaaatttcaaatgatgaaatattcctaaatactaacaatcttgaagaattcatcccaaattcgtatcagaaccgaatatttttcccctgtactccaagccatttatgacctattttatgagcctataaatactttaaaccttaacgtcttctataatcatcaaacacaccaaagtcacgaagaagaaaaaactatagatgaagatacaatagtttgcggagttagaaattgtgtctctagtgaagatagatgtcaatgggagagattgttgcaatagtttgtaatagagcttctaagatgttgtgtacgggaacggttgtgacggcgacggtgagatgttggtgcaacggtgggtaatggagcttctcagctgtgtggatcactcgagggaactgtgtgacagttgcgctgagatatgggttgtgacgaaggatacaacaaaatgcgcttgcttttgttggtgattggtgagagaatggtcggagagaaatatttttagagggtgttgtggatatggccaaatgtgcttgcttgtgtcgtaggttagacaaatgagtgaagaaataatctatactattaagagagaatgaggggcagacaaatcataagccatttaagccacttttaaatatcacgttacaataaaaactcaaacaaaaaaaagtaagggttccttgcatcatcaaagccgacctgaaccgtgattaaaaccgacccaagtaaagatatgcggatcctgcaaaatgaaaaatgggctattcacttgttttggtaatctaattaattctacgtaatggacttcacgggtcaaggcataagagatgttctcgaaaatatgggtgtttaatgttgaaattaataacaaagccgaattagattcaatcacctaaaagatatttctataataaatcttctgaatagtagtaaataaagataaattttctataacaaacaaaatcatttttccgtatattttgataagtgaataaggataaaaaaaaaaaaatacgaaatcatttaatagaagataccaaacataacagaatctataaattcgaatattaactactcaagcaaatatagtattgacgcaaacaacgatacggattcagttattatatttaccaaatataacaataactatatattcaaatcctaacgaatcgagcatataccttaattatttatttgaaatcccgatttgcaaatatattaaaaagattttaagtttaaccctaaaaatctttagtcgaccttcttttcctataaatatgcaagtctactaacaaatttaatactcactaagctctcaaagtctctctctaatcgtttgctactttgtttttcatttctaacaatggtttgaaatcttggtataaccaaattttgctgacattactagattagatattagactagattaacactctcctttttttttcttgggcaaaagattaacactctccctattataaatgtttatatatttgtcacgtatgatgatgtatgtctctattgtcattcctctaaacaaacattcaagatgattcaataagacaatttacctttgttgaagatacttctcagttctcaaaatcagttgctcataccaacattcttccgtagatgtctctcttaacattgtgatggtttctgtatattcaaaaaaaaaacttgaaacagtgcttatgtgattttacaaaaatgaacaatcaaatctttagtatacgtcttcaactttgaaaaaaactaagcaatattcatttctactcattatttactttttcttcaaccataagagagtgcattgatcaagagatgtttttctattcataatcgtagcactaagacttagaagttagacaagtttattatcaattttaatcgtaaagtcccattgcaaaatcaattttaatggatagctagagaatgcaattggaaagagattttcaaaactatgaatgtcatcatcaatatcaaatagaggaggagcatatcgtcattctctcgaaaccaaattcgaaacagcaacacaaatttgtggaatgtgtcgagaaatatttctctgataaaccttgaaacacttgcaaatagtaagattaactggtaaacttaagtatgtgatgataacttcgttagttgacattcataaccatatcaatatatgaatcgatgagccatcaatataatttacagattatgaatcttgcataaactgaagaaaatcaaactcgagacagatattagttgaaaacgctggataaaaaatcaaaatcgtaattgcttacttcggcccggaatctggatatcgaagcatgcaatgtatcaattcgaagtcagcaaccgattcaaacaaatcaaagcatgcaaagtacaaaaccaatgcaaagtgaaaataatatgatgcaaattcaattgacaataattacccatagagaagatcaagcttcttgaaaacactattcaaaaaaaaaaaaatcacatattgggatttcatgagcaaggttacctttttataaacggacacggtatagaaaatctacatgagattatccaattatactaaagtcgagcgatgctcttaaatttgttcggtgtatgtttttttaagataagacaacaatggttctacaatgaaaagaatgtccaaaaaataaaaaatatatactttgttaatattcaatgaaacagaaatataaatgggttaaggataatgtatatttgcgtcattattaacctctaatttggcccaaaacaattcagtcaccaacactaatgggccggtgaataacatttatttgcaaaaccatgttttcaatatccaaatattaatttataaagaatatattatgttgcattaccaaatatttaatttacaattctctttattaaattccatactattttaagttataacttttacacacctaacttctccaacatatcaaattatttgttatgcaccaaactacatattttaataaacacataaaaattatttttggcttacgctaaattatttttaaactataaattcaattcttaatttataactaattaaacataaaatacaaaattatgtaccaaagtatgttttaggcacaaaacataatttctcaaatattatgatatatacactattatataattcagtaatacaacaaaataatatattaatacatttttatgcaaacaaaaacgtatataaacataccacccatacaaccaggtatcaatttatttaattactaatatcatggtataaattctattctctaattcccaaaacaaaaacagaaaaatgatttcttaaatacttcttaaaatttaaaacttgaatatatattttatacaatacatattttaaaatataaaatctcgcacgtatatgcgggttgccaaaccacatgttagttttgacatgttttcaatcaataaatgcacattttaaaaacatatacttaaatagtacaatcaataaatctaacattttaaccgtttgctatagcacttaacaacacacatatattataatatattgatattaaaaatttgacaaaaccataatattaacaaacaaaaaaaatttactcgataatataattaaaatttcatggtacaatatctttcaaaaatccaaagttttgtatttatttatcaaaacttaacatccaggcgaagcacgggttatcaatctagtattaaatattttgattggtttggcgaattatgttaggacctattttctttatatgggtttgggtaattctaatatcaataagttggagtattaaaaattatgaaattcttaaaactaaaattaaaatatacacatatttatacaaactcattataaatttataataaaaaccatacatttatatatatatcaatatatatgtgtaaaatgtaagatattcaaaactaaagtttttcttacatataggtcggcatatatacggttttattttctttgcacaaataataaataaacaaacaattacaaagccatataacttttattttcatttataaaattaaaaaagaactattaaaattaatttaaatttatatcttttgaataaaagtattattaaaaaaacaataccaaaataatgtttaaattcacagggcgggtttaggtcaatatgaaaagaaaacggtataccaccggtgaaatcataaagtaacaattaaaataaatgatataatctaaaacaataaactaaacgaatattttttacacaacctatattaattaaaatttaaactttttagttacaaaaatcgattcacggtgtactatagggtcaaatctagggattgtacaccaaataatatataaaaacttaggattgtatatttataaaatacaaaaaaaataggttatgtatatagattatcttttaaacaaattacatattcaaaaaaaaaaataacaatagccccgcggtgtactgcgggtcaaaatctagtatatactgaaagaggagaaaaaactgaaaaactagagaggtaaagaacacattcagtatcggtagtggagaagttctgacgccggtgaggaaaagcttcaccaacatcggagaacgtggctggattaaagttttcaataatagcgtatgggagcgtttctcatgtatgtctaattctaatctcctaatcttctaactaatcttcttaattatgcaattgatatccatatgactttacaatcatcaaggtatcaagcatcctttaaacttcaaaacatttcttttcaacaatttgatgcaacactcgtctcttttgatttaatagaagactcttcaaataaaacttgtttctaaaaaatcacccaatctggttttgtgataccagattatatcgaatatcttagttataaatagatacaacgatcttatagttcttgtgatttcaacatcatcccttgcgaatatcttggactatacaacatcatcatgtgcacttgcagtagtcgtgttatcttttgaggtaaaataccaaagcgaaataaaacatgcatcactgttagtaatactggtagccaacgttgtaaatgttgtttgaagaatcatagggatgagagccacatcgcgaagttcctaagatgatcgtctgcagcgtgttgttccaatctggagtagtatgcattcaaagaagaggagtgcatagatctgaccaaatgtagaatgtatacggacaagcaaagaaaatgtggtctctagtctcatcacgttcaccacaaaatgattgctcttgtccccaacgtcacattcactgacctgtagagagcctatctttaatggccagccaaatgactgctcttgtccccaacgtcgcatttgctgacctgtagagagcctatctataatagccagccaagctatataaatgacactttaggggaagaggtacgtatgatgtcccaagtgcattttgaggagaaaagtggctgaaactctccttctttatgcttccaaagaattttatcttgtcaagccaactgacatggaaggaaaatggcattgattctatcgataactactctgtaaatttgcccccgagctcgacgtagatgccatctttcattttgtacatcatctgcaacatatgcttgcttgtcaataccaagatgaagtggtccccagtcacctgttgtatcaataaaacgcactgcaccagtccaattatcccaccaaagcattgttgatttcccattgtttaagtctacttgcataagtgaagctgctagttgcctcatcttaaggagtttccgccatatccacgatcccacactactctcccaaacactctaatacacattttgacgacaccatgctacccaaagtgatacagatagtgtgaaaagtctctagatgagactgagcgcaaaaacacaagacgagtcttgcatcctttggtttacacacttcctcccaagtaactttcgtttttgtgtcatcggttgtgtgaccataagaaaacattgcacaaactaccaatgatttcaaagcaacgcttcgggtaaccgaaaaatagaacaccaaatttttataatgctcatgatgagggattatgatataaccctattattaatgtttttggctatgttttagatacaagttttagagtctttttgttatttctagtccttttagagtcttttcaagtattctatgtattgagacaagaatggagataaggagatattttggagcaaaaactgaagaaaccaagtcaaaggacgaattcactttcagatcaagtcgagagtgtcgatcgagacactcttgctatcgattgacactagttgcggtcagaaaagtccaagatggtttagagtttgaagaaaaggaaatttgccccagattattagtcccttcacgtttttaggtcatatatatatatttaaagtcattgtttagacctaaaaaaaaaaaaaatctcgattgaatccgtcgatccgtcgctctccgcctccattcgatccgtcggtctccgcctccgtctccattcgatccgtcgctctctgcctccgtctccattcgctccgtcgctctccgcctccgtctctctccgcctccgtctctctctgtctctctccgcctccgtctctctccgcgtccgtatctctccgcctccgtctctctccgcctctgtctctctccgtctccgtctctcgccgcctccgtctccctccgcctctgtctctctccacctccgtctccctccgcctccgtctctctctctgtctctgtagcttcgaacccagctgatctcatacacctgaaaggtataaaacatccagttaatgtatttgagttcttgactatttactagtatttgatttttgaccgttttaaacattgatcacatatcacagccggatcttctgcctgcatcttctgcctgtttgcatcagaacacagaggctagttttcacaatgaaatttgtatttgattgatttgtttaagatttgactgatgaattggttgtttgctatttggttttaatgaactgttgttgtgaatgtgaaaatatgaatatatatgtttgtttgatttttgtttggtgttcttatgggtctgttttgttttctttatgggtaagcacaaataatggtcgacaagatatgggttcatcttaacaggtatgtgaaaacatgttatagtcatgtatatagtggtttaattgatatgttaaattttgtaaatggttttttgctttcatcttacttctatgcagaaccgatcctggttatgagagtggtgcttgggattttgtgaggtctgtggctgcaggtttaggagaacatgcgatgattatttgcccgtgtattgtttgtcgcaacgttgatcgtcacttagctgttgatgttgttgatcatcttgtaacaaggggaatggattggagttataagttggggacgactggtatcatcatggagaagtgaaatcagtatctgattgtagaaagaacgcaagtcagtggaaccaagagattttagggttgttcaaagctgctgagtttatagatgaaaagctggttagtcaaggtgatgttgatgaggctgatgataaggaagaagttgagttttcagcaaagctagctgatgcagaaacacctctctatccaggttgcacaaatcacagtaagctctctgcgattgtttcactctttagcctaaagactcaaggtggttggtctgatagaagttttgatctgcaactcgagtccttgtcaaatatgctacccaagggtaatgtcttgcacacatccttgtacgaggtgaagaagtttcttaaaacctttgatatgggttatgaaaagatacacgcttgtgtaaatgactgctgtttattcagaaatcagtttgagaagctcgacagttgtcctaaatgcaattactcacgatggaagattaacacgcgaactggtgaggtgaagaaaggtaatccacagaaagtacttaggtactttccgatcattccacgtctcaagaggatgttcagatcagaggacatggcgaaagacttacggtggcatttcagtaacaaaagcaccgatggaaaaatgcgtcatccggtagattctgtgacatgggatcaaatgaattagaagtatccatcatttgctgcagaagaaaggaatgttaggcttggactctccacagatgggtttaatcctttcaacatgaagaatgttaactatagtgcatggcctgttttgctagtcaactacaacatgccacctaacaagtgtatgaaagaggagaacataatgttgacattgctgattcctggtccaactcaacctggaaacaatatagatgtgtatctagaaccgctaatagatgatctcaaccatctgtgggaaaagggagagttaacttatgatgcattcagtcacacaacattcacgttaaaagcaatgcttctgtggaccatccaggattttcatgcatatggaaatctagcaggctgcaaagtaaaaggcaaaatgggttgtccagtatgcgggaagcacacagatagcttgtggttgagtaattgcagaaagtacgtgtatatgtctcatcggaagtctctgtcacccacacatctttataggcgaaagaaagcatggtttgatggtaaagctgagaatggaagaagaggtaggattctgactggtcataacatatatcaactcctaaaaaaatacaagaatgattttggaaatgtaaaagtaaaagaaagaaagatgaagatgaacgattgtactggatcaacttctggtactgatgatgaatccattgcatcagaagaagaggaagaacaattagatgaaggtgagctttcaagatggaagaagcgctcaatcttattcaagttagagtattggaaggtatgatttattatcaaagttattcaagttcagattatttggagtaagttttgaaaaataaatgtcttagccatttaagttattatctgttactattttgtctaggaaatgccggttagacataacttagacgtgatgcacgtggagagaaatgttgctgctagccttgtctctacaatgctgcattgtgggaagtcaaaggatggtattaaagctcgaaaagatctgcaactgcttggtattaggaaggatttacatccccaagcccgtggaaaaagaacctaccttcctccagctccttggtctttgtccaaaacagagaagaaagtattctgtaagcggttatttgacttcagaggtccagatggccattgttctaatatttccagatgtgtgaagatagaagattctactgttaaaggacttaaatcacatgattatcatgtgttgatgcaacaacttcttccagttgcaatcagaggtataagatgaattcttttagctgaaattcttgcataatttgatgtgttgtttttaatcttcaatgttatccatttataggtttgttacctaaaggtgttaggatagctattggacgcttgtgtgcgtttttcaacaaactgtgtcagcgagttattgacagagagacagtttctacaatggagaatgaaattgtggaaactatctgcatgtttgagaggttctttcctccaagtttcttcgatataatggtgcatttgacagtccacttaggcagggaagctcgtttatgtggaccagttcatttccgttggatgtacccatttgagaggtacaatccagtagcttataaggttttttcttttacagaatacttttatgcttaaaggtagctgttttatcttcaggtacatgaaagttctgaaggattttgtcagaaacactgcaagaccagagggttgtattgctgaagcatatcttgctgaggaatgtatgcggttctgcagtgatttcctgaaaaagacaacaaatgcagaagaggaaattgaaagaaatactgattatgagaactgctctatattggagggtcgacctatatcagcagccacttcaattactcttactgagaatgagaagaacatagcacatcttgcagtgattcataatatggcgcaacttgatccttatgtggagtaagctattctcttaacttactctttattatttttttaggatattcacaatggtttagatgatgttttgctttctttcaattttagcatgcacctagaacatctacaagattctaatgaaaggtgtagacgggattcaggatttttatggaatactcattctcagaaatttgcttcttggttaaaagaacaggtaaattttctggttttgtattgttttattctctgagatgctatctatatagtaaatgacacttgttttttttaaatagatacctatgacttctgataatgaagatgcagttaagtggttagcatatggtcctcgtctatgcgcaagatcttacacgggttacatagtcaatggcaatcggtttcatacagtttcaattgataggcagactcagaactgtggtatgttgcatgaggcgacaacaatgtgtatagctagttcaaaggacaataccccaatggttgatgttgtgtcttattatggccgagtggtggatattatactgcttgattataatgtcttctacattcctatattccggtgtcaatgggcaaatataggaaatggagtaaaggaagaagatggcttcacacttgtcaaccttaaccaaagtcaagtttcctttgcaagagatccatacatactagcatctcaagcaaagcaagtgttttattcaagggcagatgaatcatcgaattggtatgtagctatgagaggttctactagaagatacagtgcagaagatgctgaatctggaaatgcagacgttgggccattgccagtattagtagacatggatgcccttgcagatgacttggttgatgatgataggaatgcccgagctgactgtgaagggatctatgtgtgaaatcatattacttgtgatagttttgattgcttattattgcttataatgtgtgttttgtgagattgagattgtttttgcagctcaagaatttgttctgataacaaatctatgttttgtttcaggtgaaccaagatggtgaataatcgaaaaaggaaataccaaaagaagaagaagattgacgagttagctgagagacatattgagactcaggaatttactgaagtataggcagataataatgaagtggaggctgatttactagcagatgaaactaatgaagtggaggctgatttactagcagatgaaactaatgaagtggaggctgagttagtggataaagagaatgaagatgctaacaatgaagtgaacagagaaagtgaggaaccagttgatgatactgcttctactgacgctggggatcctactgtggatgttgctgaaacagctgctgaaccaaagcgtaaaaagaaacgaggaccaacgaagatgaaacacatcgccaaggacccaaaatgaaaaggttcacgttgactatactattatgggagaaccttgtggtccaggttcagtaccttttgcatcctatttaggaacaatagtacgggaacatgtttcttacacaattccggattggaggaaagttagtgaagatatcagaactgtcttgtggaaatccattgaggtattctaattctctctgtttgacatgttgttgtgattttgaattctggattgattttgcattctgtattttggatttgtatgcaggcaaggtttgctcttgatcagccactttattctgatcaatgtgtacatcacgttcctttggggcctaatgcttgtcgagtatgggtggatgttgtgattgttaaagatgctgcagtttggaggcaatctactgaaattgagtatatggaagatgcacttggaacttctattgcctggccagaagatagaattgcaatggtttgtatatactttaagtttacatgtatgaaaaatatgatgacaacaactgatttctacacttcagataccaccttctacactaatatatgaaacatgaaattaataatgtaaaagttatatgataattaaaatttatgcatattcatttcatagataaaaatatacttattaatgtattggaaaaaatacaatattacatttagtcattaatcttacatatttagtcaatttagggtataaatttgattattaaggataatataatttttgatttttaaaaactctaaataaatgaaactttaattttaagtttaattttaacaccatatcacaaaattaatacaaagaaaataacttcatatttggctatttacataataatcgtaagaaaattatttcattggataatagattaaggtgtggatcaccttattattgatatcaaccgttgattagtatacatctaagggtcacgaattattaagaggacaattaactcattggctcattgattaatgtgtggatcacctaactattcatatcaaccgttgattagaatacatctaagggtcaataatcaaagatgttttaattactttcttatctctctttattcgatggtctttcatctctctctctttagtcgatggaaacccaaaaaatcgaagcttctttcatctctctctgaatctacttcttctgatttactttcgaatcgaatctacctttgagttcctcaacttcttctgatttactttcgcccagaaaaggtaattgttttctctgaggttttgttagttccttatctgatgagttcgatggtctttggatccagatttggctgttcgagaagacaaatttgaggattaaaggaagaatcactgtaagttaacatttattctattgcagacacttatttttagctatggaatatgtgatattgaagcatgataagcatgaattgttgatattcctcactttgtttattggaaatcgatttggttatgttaactttaggagagcttcaatgcattaggactgtcaatatctctgtattatagtctctgtttgattgtggaagttgagccatagaaacgaaaatgatttgttgacattgatagttgtgttctgttactacagaacaaagcactggttatagccagtcaatagaaacttgtttgattcttgaggttagtccacgatggatcctgactcatactgcatctgtattgatatgcttgtacgcctttcgagttaatattgaagctgttcgtaggttgagtaatgagtagatgataatttagagaacttgagatgtatgatctcattggcttcaaaattggaactgtctccttgaacttgtatgttgctagtttcagtttgtatttgcaatacttaagattcaagcttttcttaggttaattctattctaattcggagaagtttgagatttgtggtgttgtctttctcattggtactgcagaaaccgctagttcaatggaagctaaaggactcatatgcggcctcccagctaagaacgttataccaaggctcagacaacagccacaacagcaggcaaataacaatcaacaaaacgaggtggatgatgaactgaaggagataacagagctagagtttaggcagtcttgtcctcaccttggctacttaatatggatcgaactagaggaagaagacattgatccactctacaagcaatggttcagaaacatgaaaaaggatgcacacaacaacactgctaagaaacgcccaagagaggaaagaggagagtcaaggcgcaggaatccatgagttcatgttttaatggttaatgtgtctttagttcatgtaatatcttgactttgttaagttaactttatgtaatatgatattttatgattcattgtctttcataaattaaagctaattatattttgtgcaattcaatatttcaaacaaccaattatatttgattcattgcaaaatagattcaatatatgttaaaagtatatatcttgcaatatatatacacagcattttctcactgtcaaaataaatattagatagtacaatataaaagccaataaatcatatattatagcacgtatagcacgataaaaaggctaaaacattattaaatcgcaattaatagatgctattgtaaatgatattatgacaatttataatagctattaaatactacacagtagcaaaaccaaagggctacaaatcactttcttatagcatagttttacgctacaatagtgtacaattcgagaatcataatgtcacaaaacaatatccaacagcacatataatgtgtcatcattaccaaatatacaacatagcaaaattgccataaaaacgaacatagtagcaggaaaaaagcgctagttataattaataaatagcggaaggtcaatgctataatatgtcaatatactatagctactaaaaactgctatgatagggggggctctactatagctccgcatgtaacagcgtttataaatacgctacgaaaggtcttcagtagcattttccgtgtgctattaatgtccttatttcttatagtgcacattttatctctttaggtgtaatgtcgcgaactaatgatgcagcagtactttccggacatttgtaatccaaaatctatgctagatactattctaatacctctttgatattttatggctttgcttggacacactgttggatgtgagctgcatcttttttattctctacaaaatctgttagaactgccccatttgtagaaacgagtttcttgatagaatttttcgacgcacgagccatagttgtgcgatgaaaaaatgatgagttgtgatcactaaggtggagccaaatcagtcgtgactttttctagtagatattctccccaataccagcaaaatgattccaagtgagattattctagtcgtgaatttttactataatgtgcgagtgggagatgatggtttagaaccggtcatgcccatgattaagacatagctttgactcagttttgttaaccgacagctacgcatgcaatttgtctattaaattaaatgaacatatgcatctcttgtttttggtgttgatgtgagtcaaattacactaatgactactctctcaaataaagacgttgttataacacttagagatcgaatcccacaaagttctcagatcacacaatagactaatagtttcgaattaagctaaacagaaaatattataaaataaaagacaaaaaagcaataaaaattggtcgtagattcaaatgattaaaacgtcaggtttagagaaattcttaggaaatatcagaatagtagttctagcagtaaagtaggattattatcgaaccattctataattcaaatcactaatatagagtaaccggtgatgtgtcgtgctactcattatgcttaatagtattgatcccaactctcttgtaaatccctagaattaagcaagcattctaatcaggtttgataagttcacctaagtatctaaaccgacgctagcatgcatctagatactaggctcatttaagatagttctggtaacaggtacctatggtgggtatacctattatcataaaatcaataactagttaattactttagaactagcatttagaacaatcaaagatgaaaaattctaaatatattatcctaacagggtttttgatctactaattcatctaaatccctaattgagaatccctaaacccatcaatagaactactcagacatgattatcaaggaacaaaacatgattaacgtagaaatcaatgtaagaaacaagatgagtatagagtttagaaagatcttctctagaagaagctccacagggttttgttcccaaaaatagaatagataataagtgttaggtctaaacaatgattttaaaaatccatatataagttcataaaacgtgcagggacttctttgaaaataaagagaagttctggggcaaatttggaaatcttcaaaacttcaataagttgcgtaattgaattcctgtcagatattggtgtcgctcgacactaggggtggtgtcgatcgacacctacgtgaaatttcgtctccagattgcttatgtagtttaagttgtctgttttgctatagaatgctccataatctccaattgcatcccaacattgtaaagatctgaaaaagactagaaaaataaaggtacgtcttgacttcctacaaaaagactctaataactatgcctagatcacaactaaaagcagtgaaaatcgaggtttatcaggtgtctttaagacatgtcttttgtgttgtatatatttcagatattgaagaaaaagaaaggaacgtcttgacttcctaagagttcaagagaaaaacagaacaccaaagagaacaaaaatagagacaataagaaaacagagaggacaacccgaagaggcacttgatggtgataagtgtttgatatccccttgtgatatctttcatgattttttccaattctagatcacgtccaagttgtaaggtacgtctttggtataaacgcttctacatcgttaaactctaatattagctttggatgcacggatgcacatgcatgcaacaatttaatcactagaaacgaaagtgaaatagatctgctaactgtcactgataatgaagagtgcttaacttaggtaagcttgacattttggtttctttgtccataataaacatgttattgtcaccaattacctgtctttttttgaagtacaaacttggagaattatggtggtaaaacaaaacggaggcagatgaggacttcccctcttaaatcgtgaagtatatatatatatatatatactacgagaaaacatggtattagcgactacactattcatagctaaacagtcgcttaatcgaaatttacgactatttggcgactaaaacacgtagttggcaatacaagcgtcgctatattgatatgtagccaaacagtcgccaaatggtgaataactagcgactacataagtagtcgccattgggtcgccacccagtcgccaattagcgactgtttggctacatttatgccactatatagcgattagttggcgactgattagccactaccgggcgattgttgtaaaaacatggtaaaaacatataattaatatccaaaaactatttttcttcctcgattctcattacctttagaccggttttagttagctttaaacttcggaacttcgacgacggtcgtggctagtcccccaaccagcaacgcctgtatgaagtacccagtaagcagttcttctttcacaaccttgcaattacagcttgaggaagccaacctcaagatagatgaacaagctactctacaagcacatcgtgaggcagaggctttgcgggttgcagctgagcaagcagagatcaagcgggttgcaaatgagcaacaagcagagatcaagcacttgaggatggtgaagaagtacttgaccacaacagacccaaattttctcgccttcctcaaatcttctactgtttcagaagatccaacagaagagttcctttagctatcccttcttctcttctccgtcctttaaaacttgaaaacatgaacttgttgcgtcggaggaggatagtctctgacagtggcacccgtcgaaggctgtgcaattagatttctatcagggtattgaactggcggttgacgatccgccggcgtgaactcgtactggctggaaagtagtgggtcgatttgggggaatcttcgatacccttccttttcctctcttgccttttccaccacgagtcctcatcacttgaagctaagaaacgagagattgagaagattgaagatggattgatgaagaattgggatcgaatggctaaaagggattagggttagggttcgtcgagagtgaagaaaaggggattagggttagggttatgcgataaaatcgtttatatattctgggtaatgggctcttgttactggatcaagccggtaaaagcccaattaattgcctaaatagaatatatgagtcgataaatggtaactgtaactagcgacctattagcgactaaattaatcagtctcacattcaagattgattagagactaatgtataatataaactaattagtcgctaatacgtcactatttagttgccaaagttaacgactacttaatccgtcgccgaataagtcgctaataccgtgttttcttgtagtatataacacaactcaatgttgataaggacatttgcttcttaaggaaggctggttgggaagcactttcatagatcgtcctccgtttcagagtttttactcagtttttgaagttggtagttaaatttcagctaaaaccaaaaagatattggattgcttgcaacattagtttgtgtgtgttacattaagtttaagattaattatttagcatcctaattacttgttacataaaatattttttgttatcaaatagctactaaatttgtttatgttcgtatttatttattttttaggatctcaaactgctctctcttccagcaccaccaaagcataaactttgtcattcgtcatgtcgttagtaaagaatatgtgagatgtgagagcataatcacctacgccaatttttattgaaatatttattttaatgtgattaatattatttattgaaatgttgaatttcttttttttagttgtctatttattgtttttttgtcaatcatttgtctatttattgttaataatttaaatttcttcaattttaaaattactatggtagttcattcaatttaaatacacagctaaaaaaactctaatacgacttttaggattttataacatttatcaaaagaacatcctttttgtttaatagcttttcctctacttttagatatttggacccggtctttttatgtacgacattttaattaaatttcatgaaataaattattgtatgaagattaacttcaacaactttctcattttggtatgcgcaaattcactattgttttatgtgtctctccactgcactagttagtatagctattgtaaagataagattatttacaaaattatatccataacttataagattatctatattttttttaacaacttatattttttctttgaaagaaaaaaactcattttttttcttacattctttcgatatgtatatgaatttccgtcctcacatttttttttaggagctatcatttttttatgtctttttgcaagcactcattgtctttgttttaatctcttttccaattaacacatcttcacaaaacgcaatcagacgctctcatcagaacaagaaaaactactattagtctcacatgattacatgataaacaacctaacaaacataagcatatatattaggttggggtaaaaattctggaagtaacaaagatgctgatttccacgggatatagcatgtgggaaggaggaaagtcatagtgatccattagatggatgtaatgcaagagtgagcaacatacaagaaaaaacgatctaataacgagagttgttttcaaatacatgtgtccccaaactatctctcccgaagcttttcttgtgtgagaaacctaacttcatcgcatcttgccactttagtgtccgtttaagaccagcgatgctagagggctttaggttaccttggtcttgattctacttgtgcacttgaagattctagagagttatgtcggctctgtttctcgtggcgtgtgtcgaaggaccgccatgcgcgtgggctctttctgatggctgaaatctcttgtttttttgcctccactacctgtagccggtgatggatgaaggtggatgctttgatttccggtcctagagtctcgcatctcaagcgttggaagcttttgtttgtagatctgttttggggtgccttctttctggtgtttcaggtggtcgagcgtgctttcctatgctgtaatgtggtgtcgcctctcctccttaaccggtcacattttttccaagatctctcttggtctaacccctgcattttggctcttgcctgctggagttatgggtttctttgtgtcgagttgttcgcattgaggacaacttactcccacacgcttaaagcttttgtccactttgtacgtgttgattttgtgtgttggagtttgaatcgagaggttttctttggtgttgtggatggttcgccatcattggttagggttgtccatcgaccctttgtgcttttgatgcctcgacctctcctctctagccctcattcgcatatgtttgtagagcatggctacaattggaagctttttgcctcaaatgttttcgttgagcatctttttcttgaggacagtagcatgattattaagagcatgttttcttgtggttgttcaagctctctcgtcaacacggatgctcttttgctcctttataagttgaggttttaactatcctctccttgagaactccacatgtataccaattatttgatttagtttaaggcttcttctatgttatgaattcctgttatctaattatactaattcaacagtcaattgtccaataactgaaacattctatgattgacacctcagcatactactctttttcttactctttcctttttttttacggagaattaagcaaaattttcattaattaattcatgaattgttaaaaaaaaagataattggtttttatttaccttattatttttctttcgcaaaccttattcttctctctcattcccacgacctccacaactccacttcctctacttctgaaacttccaaaatctctatgaatataaaatctcaagaatcgtttactcatcctcaagcatccattattccgagcaatcaactgttttttctcatcttgaaggtatcaatttaccatcttcaatttctgtttttaatttttcatagatctgcaaatcagataatatcttcaatttctgtttataatttccatgtttttgtttgatttcttcttctctgtttatacttaatcgattgcaaacccttgaaactaattatctctttgattttgatatttaggttattggaagaaaaaaatgccgctggaaataacaccggtttcacagctgcattctcacctgtcaacgtgcaaagtgaaagttcgaattgctcggttatgggcataccacaaaaaagacagacccaaagatattatgggaatagaccttctattggtggatgacaaggttctgtcatctagcttatatagaaatttctttgtcaatcttttaatttaaactattcgttttctttttgtctagggagagaggatacaagcctccatcagatcgcaattactttcaaaatttcaggagaaactagaagagggagattgctacatgattatgaactttgagatttcagataatggagggagttatagagccagttctcacccctacaagatcaacttcatgtccatgacacacgtaaaaaaaatgtgatgagcagattccaaacttggaatttcgtttcaacttcgtccctttctctgatatccaagctcggactgacaatgataatgttttcattggtatagtttcttcttcctaaatttgttttttaatttttcacttgtaactttatctttcaaattaatgtttgcttatattttcatacgtaattggtgagatcattggaatgcaagaacttaaagaggttaatgtttcagggcgacaaacaaagttattaaatttacagcttagagatcttgggttagttatctatcagcctaaatatttcattatttgtataatgtacctgcatctttactgacacaaacatgccaataattgtatcagagaatcagtcatcgatgttactttgtgggaaaaatgggcagaagatctgtactcttatgttaagggctacaaagatggttcaattgttttagttggaagcttgatgaagataaagacatattttaaaaacgtatatctcactttcactataagggattcattgatttggttcttaatatttagcaggcaagatctctgtccaaaatcatcattttcgaccaagctctttatcaattcctcaattgccgagataactgagtttaaagaaaggtaaacgagtcttcttaacttttgtctactaacaacatatcaagatgagtatataacatttcaatatatgtgtctacagtttggccaaatctgattgtttagctttaacaacgatttcaacaattacgtcttcaagttcaagcaagcattcaaaaccttcattctctttgcgagatcaaaaaacgattgcagatataaattcggtattatccaattttctatgttttgggtcattgtttaatatactacatctgaaatgatcacgttttattatattttccctatatggtgatatttcatgattaggctttttagtgattttcttatcgacacttttatgaaaatgaatgttaatcttcttttaatttcagggaggggcatgtaatattattgcatcaatattctccattgacacaaaagttccatggttttatattggttgtaatatatgtttcaaaaaagtatctccttatttcaaccctgaaactgaagaaatagaagctggaaaatatgaatgtgaaaaatgtgacacatttgttactactacaagcaccaggttatcatgttaaagtcatgtttgcttatatgactatcttctatcataagtatttaatttaatactagaattcgctattatgttttaggttcagggtgcaagttacagttcttgaccatactggggaagcatcatttcttcttttcgatcaggatgtcatcaagctcattcacaaatccgcatatgaattgctcgagcaacaagttcaggtcaatcttctaaactccactatttgaaaataacttttaaatttatactaatgtttatttatttgtcaattgatgcagtttaatcgttccgacaaaattcctcaagagctgcttgatttagaagggcgtcaatttgttttcacgatacaaggttcagactcaaccaaattcagccgaccatctatctttagggtttatgaacttacggacaaacccgaaattgttcaaaagtttcaggaaaatttattgcaaatggtaaattcagtttgtctttggcgttttagttacattcgtttttcatggtatcaacattaatgtgattttttttatttacagaacacaactgatccaaacactcacatggtctcaagcttttcaaactcaactaccagcgaggtttgctactgaataagcattagatagacaacaaatttcatttagggataagtaattattttggtgatatcttttttagactgaacctgattcagacatgaacattgtctctaccccttcaaatgcaactacaaatcaggtaataactctaacgttccattacatttaattttcaagtgcttatgtattttaaaattttgaattttatttttgtttagattgacactgaatcttccgaggcggctaactatgaaaacagcaactcgtctatcaagacttctaagaacacttcaaagatcactaaattgactccaacgtcaaaacgagcactaacttcatcgaaagataatgcagctcaaaagtcatctacaaagcctaaattgttgtccaaggctgagataaagaaagaaaaaaagtgatcatgttacgacctattaaaatatgtttcatgtctttgcttcaagtatgtaaatgtctttctattatttatgtttcacgtctttgatttaagtatgtaaatgtctttgcattatgtttttgcttaagtatgtaaatgtctttgcatttaagtatctaagttattttacaccagttatttgtcctgttaaactcatatgaatggttactgtatttatttttattaaagtcatcttcttttctactattatatcaactaatttgctgctttaataataagtgttgatttaacttagatttaagccctctgattgtataattcagaacatatattagataaaaaaaattacaaacaaagtaatttaaatattaaaaaattatcagtttcatttttagacgaaattgagaaatttggcgagcaattgaccttaaatcattatcacgatcaacgtacgtaaatatactgtttctatatcattatcacattcatgcatgttaaatatttacgtatataatgtttcaaatcaaaattaattacacattagctcttgcttcattctcttttttttttaacatcccagccgactaaaattaattactcattagctcttgcttctccaataatagtattgtgcattattatcataagaaatttgatggtaattgagatttagacggtggaacaaataaattagaatagcaagtgatggaaagactttgatgttaaatggtaaaagcccatttacgagcccatccaaacttaaaacataataagagtattaggagaaaaaccaaagctactaaaataactcaaaagtcatggacgatggacaaagatgagtcgtagattaatttttaagtagaaataattgaataactaataaaatagaaaattagaatcctatcccacgttcataatgcagagatcgtgttagtttctatagaattacgaatcaagtttctatagcatttccaggaaccatcgaaagagtgtcatgaagtttggaatctccatttttacctgcaaagcttgaagatatagtgtactcaggtaatgcatgagatcattaatccaaccttattcgtaaatcaatatttggtactccctaaactttatttaagttcaaacctcatacagatggacactgcaacaagtaagaaaaggagaaaagaaaggtcagcttatattgcagataataggaacaaaaaagattccagcaacaaaggtgacacttctttctctttgtcgtaccatacaaatcaatattgatatccagtaatacacatgtttgcctaaaattgtaatacagagaatgaaggctcaagctctaacagcaatagagctgcatgtgctgcacctatttcacaaccgctacaaagctcatcatcacataatacattgaaagatatcacaaatggtaatctatatggctcaatgcaaatacatataatatcttatacattatactaattatgtatgaaacttctacagaaccttctccatggctaatcgcccaacaacttattatgaataagagaaaagagaaaaggaagcacatggaaacacgtattgttctttggatccttgaattgtaaagctaattgcaatttacatatttcatacattcatgtatgattaattcatatcttattgtttatatactttgttaatagatgttccatcaagcagcaacacaattccaagttttagtcacttagtcgacactaataacaacacattctctcaacctacattctcaaatcgtgcttcatcatctaattccccaaacgcattatacagttctcaaggtaacaaatattttagtttagactcccaatattatatcaaacaaacttttcttaccttttacagattaccatgatcttggtgatgcaacacacatgtgtgagcattgtaatgctttcatgtggtatgatgagcgtgtcgacaaaagttttcaatttgctgcactcatggaaaaattcaactccctatatcaccaatgcctccacagctgctccttgacctgctttatggaaacgatgaaatcagcaaaaattttaaagagaacatcagaccttatgacaccatgtttgcatttacttctatgggtggaaggatagatacatctataaacagaggacgaggaccacctattttccgactgcaaggacaaaatgtccataagattggtagtttgcttccctgtgatggtgatcctgcaaaatttcagtagatgtatatatatgatacttctaacgaagttcaaaacagaatcaaaaacttcaggtaactcttaattcttaaacataatctacatacattctttaattttcaaatataatttgtttttcatatatactacttcaaaaatatcaaaaaggctaatcgttctttattttttaattattcaagttctaagaggacaacaccatcaactgaatcaaaacgtctacgtgaggatatcgtcgaagcaatcaagtgtatgcttgaccagtgtaatccatatgtgaaagttcttcgaatggcaaaggagcggtttgatcattcaatcgagatgcctaatctcaaactaaaattggtctcaggtcgttcaacaaatagtggtaagacttacaatttaccaacggtttcagaagttggtggtctgtttgttggagattttgacaactcagttgggccaagagatattatagtggaaacgaaaacaagagaattgcacgtataagtgaactacacccagcgtaactaccattgcagtatcctcttttgtttccctatggagaagatggttatcacatagatctcgagcttaaaaagaaaacaacaaattcagaaaacccacgaaccaaggtcagcatgagagaattttttgcatataagatcatggagagaaaagatgagtcgccttatctgatgcatacggggaagttatttcagcagtttcttgtggatgggttgaccatgattgaagccgaaagaatctcatatctccagtttaaccaaaaaactcttcgcgccgaaaagtattccagtgttgaagcttctgccgaaaaaggaaacaacgattcttcgatgtgtggaaaacgatatgtcttaccatcttcttttgttggaggtgcacgttacatgcagcagaaatatatggatgcaatggctctatgtcaacattatggttatccacatttattcattaccttcacatgtaatcctaaatggcccgaaataacaaggtatttgaacgcacgaggacttagcgcagaagatagagcagatattgtaactagagtctacaaaatgaagctagatcatctcatttgggacatcaagaacaacaatgtctttggtccttcaagagcaggtaccactcattcttttatatttatctttctatcactattatagtttacttttataattaatcaaaaatttataagtattttactttgcagtgctttacacgatcgaattttagaaaagaggtttaccgcatgcccatatacttctcttcctagagaaggaagccaaaattccaactaccgcagacgttgacaagtttatatgggctgaaattccagataaatacacacatccgattcttcacgaagttgtcaaagagatgatgatacatggtccatgtggacttgccaacaaaaattcaccatgcatggagaaaggaaaatgcagtaaaaagtttccaaaggattttacgagcagcacacacatcaataaagatggttttcctatctacaaaagaagagatgatgggagatttgttgagaaaaatgggattcttcttgacaaccgttttgtcataccttacaatccaacactactgctcaagtatcaagcccatataaacgtggaatgggttagccaaagcaagatagtcaagtatttatttaaatacatcaacaaagggaatgacaaagtcacagctagaattaaagaaggtactggtccaaatgaaatcaagcggtggtatgactgcaggtaattattctgttaacatccacataaaatttttgaataattttagcggaagatgcgttagcggtgtcttgatcaactcatatcaaattattgtttaggtatatttcaccttgtgaagcagcatggcgaatttttggttttgacttacatcacagcagcacttcggtacaaagattaagcattcatctacctggagagcaaaacataatttatgacgatgatgaagacgtagaagacgtgttgaacaaagaagaaaaccaaacatcgcaattcttggcgtttttgaaaacaaacaaaaaaattgccgaagatcctgaggcgagaaaatttacttacattgaattcccttcgcattttgtgtggaaaaagaaacaaatggagtggactctccgtcaaagaagtgtatcagttggaagggtatatcatgttaccccatcagctggtcaacggttctacttgaggatcctattaaacaaagtaaagggacctacatgttatgaagatataaaaacagttggagggattctgtacccaacatttaaagatgcatgttatgctttaagtctccttgaagatgaccaagaatacatcgatacaataatagaagcaagtcaatggggatctggccgttacatgagaaggttatttgcccagcttctaacgtctgaaagtttgtcaacaccttatcatgtttggttaaatacgtggaatcagctctcagatgatgtactatctatgcaaaggaaaatattgcaaaggccaggtacactataaaacaaaattttttttctttatatatatttatttataaaacaaattaatttagttttacaattgataaacaaaccaaatactgagaattctttttaaaatttgcaaaaaggaatacgatgtataagatgacagaagaaacacttggttaaattatacgaccaaatggttcttggtcgtaacgaaatatatattgttcctcttaacgtatatatataacattaaacacactaaagtctaaaataatcgttacgatctatttaaagctccaaaaaaccatgaattatatacgtaaatatttaacatgcatgaatgtgataatgatatagaaacaatatatttagaaaatacgttgaatgtgataatgacttaaggtcaattgctcgccgaatttctcaattccttctaaaaatgaaactgatagtttttttaaaatttgcaggccatgaaatgacaaatgagcaaattcaaaatcaagctttgttggaaattgaaaagttgttacgtaacagtggaagtactctgcgtaattacgaatccatgccatatccagaaaacaacaatttccctgcagcaatgaatacgttgatacaagatgagttgtgctacgatcgacatgcttgtgcccaagaccatctacgtttgttttccaagttaacagttgaacagaggaaaatatacgaccaaatcatcgaagcggtctattcaaactctggtggtgttttctttgttaacggatttggtggcactggtaaaacatatttgtggaaaacattgtctacgtacattcgttcaagaggagaaattgttttaaatgtagcatcaagcggaatggcagcactactgctggatggcggacgaacagcgcattcccggtttgcaataccactacaggtgaacgaaacttccacttgctcgatttcacctgatagtgaccttgcttctttgttactccgagcaaagttgattatatgggatgaagctccaatgttgcatagacattgttatgaagctcttgatcgtactctgaaagatatagtacaagccgacaaccacaaaccttttggtggaaaaactattacatttggtggagactttcgccaaatactaccagttataaccaaagggagtcgagaacaaataattcatgcgtctctcacttcttcgcgtttgtggaattcttgcaaagttctcacattgaccaagaacatgcggctaactgttgaggcagaccctacagaaaaagacaacatcaaagagttttctgattggattcttaagctaggagatggaaagctttcagaacctaatgatggcgaagcagctatagatatacccgaagacatgcttcttcttgactcacttcaccccattgactctattgctaattgcgtctatccaaatctacttcaaaatcttaatgatcaaactttcttcagggagcgtgcaatactttgtccaacaaacgatgatgttagtgaggtgaataatcacatcatggatcttcttcccggagaggttaaggaatacttcagctctgataaaatatgtgattttgatacttctgtagagagagacgctaacatgtctactgaattccttaatgccataaagtgttctggtgtacctaaccatgttttgaggttgaagttgggcgttcccgttatgcttatcagaaaccttgaccagaaatatggcctttgcaatgggacaaggttgcaagtaacacagttgggagatcgtgttatcgaagcaaaagtgttgactggaagtaacgctggtaacaaagtctatcttccgaggctggttcttacacctgcagattttagaataccatttcgttttcagcgaagacagttcccagttgttccttgctttggaatgaccattaacaagagccagggtcaaagtttatctcatgttggcatttatttacccagaccagttttttcccatgggcaactatatgttgcggtatcgagagttaagagtcgacgaggtttgaagattcttattatcgatgaagagggtaatcgtggtaaaacaactacaaatgttgttttcaaagaagtattccaaaatctgccaggtatgtctcacagattgtgaactcatcactgttattcaatcactatctcaaatcttaataaggctaaccccctttactctatttctaactacagattatggaagttagcagttctataaccatgacaattaaaatataaaggtacacaaatattgacacggttagttaatacattttcttttgttatattaatatttattgaattgttttatactatacatcaatatgacaaattagtataatataattattagatatgacaagtgaaggctttcaacacaaataacaatttgtatatatattactactatataaatcattttaatgttatgctttgtttattttcaactgttgggatatagagatgaaggtatgagcaacatacctttgccgttattatatgtgtcgtttaatagtatggtgcatcagctgatttgatatattcacttaacctgtcttttattctgcacgcataaaaaatttgatctcaatagttagggtccagttatgatttttttttgcatttaatagataaaaccagttaacgcttcctaaatcttatttcgcattgacagttaattat

SEQ ID NO: 175 - DNA, 39858 bp, Arabidopsis thaliana
aagcttacaaggtagacactactttatataaattctcaccaaaaatatcttcaacaaattataagtaaaagctgtcatacactttacttctgttcttttcggaattggaatccagctatacacttatttccgaattcaatatgacgacaatctgaatatgaaacaaacatatttaatttcattacctaaatatcaaatatcaataacatcgtctaagttggtattaacaacacaacattaaaaagtcattgttacaaaaattaactaaaacttcccaccaaacaaaatacatcaaaaaacgaatatattatatagcagaaattaatctaaacttaaatcttcttcttccttaatatcctgtcggaaactcgcatcttccatactctgcatattcaaaccaatcagcttcttaattagattcataaaacacactttaaaatatctaatcaaaccccaaaaaaaatatcataggattctctttaacaccaagatgacgtaaacccacgtcacattaaacactagtgatctatgttcacgtgggaacatttgacctctgtcgtgtcgtccacacaaaatttaaccacacatacactaccctaaaaatacgctaccctaatcagcgtagtttagcatgaaaagccccacaccaactcttaacatgcgccacacacaaaaaaaaagttatacttactcggtggttggctaacgacgtaagcggcgccgccgaagtaacaactcccaccggcacgacccttcttctggtaataactattgaaagcaaacgaagcgtgagcctcaagtgtatcaggactataacagttagcaccaggttgaataggacgacaatcagcaccaccttcaccacaagcataatctaaaccaccttgtaacctttcttcaccagcatcaccattagctacacaccaagtataaccattcaaactcttcgacacgcctccactcatcggaggctttgtaacctgatctcctccagtgaccggagtatgaccaccgtcacggtaatgtttcaacccctctgttgtgaaaggaatgtcgtagactttcttctcatcagggaagaagagaccatagtttctctccgacgttggacctaacttcttgttctcgttgaacagagcgaaaagatagaccgttagatctgctttaggacgtaacggtgtacctccacgtgtcaagatccgacggattaagtttccgttgtaagaagctgcgttagctagagtagctccgacttcattctcatctcctttcgacggccaaccagtttccgtgacaatgatttcgatatcatcgtactttaaagccgacattgctgcgaaaacggcgtcgatttgagcgtcgaagagattaaagtatctcaaaccattaccagaatcaaccattcctggattctctctaagcaaagcataatctaaaggaatgacgtcagagtttccttcataagcaaagaaaggatagacattgatcataagtcttgaaccagtttcacgtaagaagtcaagcattggtttgataacagagtcaataagttctggtcggaaagaaccggaggaagaagggtaagagttttgaagagcgcttaaagcaagaggagaagagattttaatgtcggagtggagattgaaactcataagagctttgtgaatgtttctcattgcagggatcaagaagcttgtagtgttgtgtgtatcaacgaagacttcgttaccaacagctattgattcgatctgtgttgaaggatgataagctgctacgttgcgtttgacccatgagacggcgaaggaagttcttttggcggcggagaagagtaactcgttggggagatctacggtgactttgattccagatccggataatgctttgagaactgatgggtctgcgtcgaagattttgactcgcgtgattccttgggattttagtagttggactactttgaatgcggaggggagttcgtcggagattcggccgtagtttactccgatggaaccagcatctgttaagaaagaaaaaaaagacagaacataataagaacagagttatacaaaaaaagacagaacataataagaacagagttatgagaatgtggttttgaaatgtaatgttgttgttacctgagagtgaaaatggtgagaggaggaggaggaggaagatgagtggtgtgaggagatccatactcagcttcttgtggagaagagagatggagagagagatgaagatttgaaggagacacagagaaagagagagtggtgttgtggagagtggtaaagaagactgggtcttattattatccagaagaaattaataagtgaataattgattaggtacttattttagtattgagattttttttttttcacatgtgacatgtcaaataatgtgtatcatctttctccattatcccatattttcacatgttgttgcagtttgtatatatgcttagagtttacaggtaatcatgagtggaattgatggggtttttatggatctgaatcattttttttttttagttgttcaaactaaactaattgatagatagattatttgtttactactctttgtttagagagaatgatattgtttatgagtaaagttcatttctgattattttattattggtagcagtatgtagataatagtgtagctgtgtttagataatagtgtgatggtcatgaaatttcttctagattcttttaagttttagtcatttgttcatatcaatgagtatatgactatgaataagttcaaaaataaataagtaaaacaataatagaggtaacattgcacgccgaccccaccaagtttgggttaaaaaaaacaaaaacctatatttgctggcttttctctaactgtagaaaaaaccaaaaccaagattaaaacttaatttttaggtgttttataaaacatataactttattattaatccaaaatgcaagttggaataagaaaaaaaatgagtcaatcacttaaattaattcataatttagtgtcaatttatcactttttttttttgataacatatatacaagtaaaagataaaagtatttttatttcttgtagactttggttgagaagacaaatgttagttgtgtaaaaatgtctaaagattcctgacgatagctacacaaaatttaagaaataatagtagactttgaatttgcttaattttgaagggatcgagaaagtgagcaaaaaagagtggcacccacatgacagaaaatgagccgtttgcggaccacgatgcctcatgccttggactcacgtagtctcactgttcataaagggcccattaacctcattgctcttgtctccttccacacgtgtgtgctcgtgcggtcgtgcctgtactgttagtgtgaatgaaggctattaataaatggttacaccatagcctctctttttttttttcgacaataaagcctttttttttggggcaaaaagaaactctgctaaaaaaacacttatttctactacggaaacaaaatgagtaaagaaatcgtcatttgttggcaagtaagttaattacttttaatagttgtggtataatatatttttttttgaaaaaaatgtcaaaaaaattgaaacttttagtaaatttttaaatgaaaaatgaaaaaaaatatgaactttcaagggaaaatagtcaattaaatctataagtatttataattgacaaatttattctgtaaatatcatgtatacacaataattcctcaatttaatattgacgtcataatttaagacataaattagtcaacgtttaacactttaacaaaagcgttagatatgttttatttaaacctactcattccgtttcataatataagttgttttggatcaaattttttgtatcacaatttaagttgttttctagtttttatgcaaattatatattattttaatattttatgattatttatattatgctgtttcttctatgattatctgaactttttaaaagtaaatattcttaatctgcatgtttttagctaaaacaacttatattgtgaaacggagggagtatcgaactaacaaaaaattatttctactacggaaacaaaatgagtaaagaaatggtcatgcaagtaggttagttactcgtaatagttgtggtataatatctttttttgaaaaaatgttgaaaaaattgaaacttttagtaaacttttaaattaggaatgaaaaaaatttgagctttcaaagttaaaatggtcaattaaatctacaagtatttataattgacaaatttattctccaaatatcatgtatacacaataaattagtcaacgtttaacattttaacaaaagcgttatatatgtattattaaaacctactccctccattttataatataaattgtcttagaccaaattttttgtttcacaatataagttgttttcaaatttctatgtaaattatatattattttaatattttacgattatttctattatccagtttttttattgactgaactttttaaaagtaaatattcttaatctgcatgtttttagctaaaacaacttatattgtgaaacggagggagtatcaaactaaaaaaaatcgcaaatcccagttttctcccaaattgaacacaaacccctaggtgattttctaacaaaatcaaaacaaagagaaattaatttcacatagcctccatgaacagaaaatgactcaagcttccaattcgaaggcaatctgaaatccaaacgaaagccattgttgaagatgagagattggaaactgaaattgaagacgaaggagatgaatcatctcacgattcttgtgtaaacgaagatgattgcccagttattgttgaagataacagaggatatatagaggtagagatagatccagctgaaaaagaaagattttgggcttgatgctagtgtagatgcaactagtattgactctgacagcaacggggatgatatttgggacgacaagaagataccagatccattatcattatcagatgatgaagaagagaaagtagaaagaccattcacttttagagagagttgtgatgatctattagcattgcataagacattcaacaatgcagatgaaatcaagaatgcactattgaggtattcacttaaaactcaatacgatatcaaaatgtacaagtcatcgtcaaataggcttggggcaaagtgcacacaacacatcaaagaaaaatgtcaatggagagtgtattgctcatttgagaagaggaaaaataagttaatgatatggatctttcagaatgagcatatttgtgtaaggtctggtaacacaaagcttttgacgagtggaactattgtgcaactttacgaggaaaggcttagtgtgaatctgaagataaaatctcaggaaatggtagatgaaattaagagggggtacaatatgattgttagtgtgcatcagtgagcaaagaggttgctaaaagctaaaagaaaagcaagtcatgaatctcattttgctagaatatgggattatcaagaagagatacgtatatctaatgatggtacaacgatggagattgagacgattcctgggccaaatcctgaaagcttgcaaagatactactgtctctatgtatgttttgaagctttgaagaaatcttggaagcagtcctgtaggcctattattggtttagatgctgattaatgaaatgagattttgatggttccaaccatagtggtgatagtggtggtcttgtataaactaaccattttattaggatttgatcgtttacaaactgttgaaccgattggtaatagtggtggtcttgctcttatgtatttgaaagactatccggttaagttcgtttttgtttctgatcggcttattgatattgaaacaattattgatggaaatcgaatttttattacttttgtatatggtgatccggtagttcactaccgagaattagtttgggagcgtttgactcgtattggtcttacacgctcggatccagtggtggatctacgtagagaggtagtggggcacgtgccctatacagattttatagatttctttaatagcttaagataaaaatgtgtatccagcttaattggtttaagttgccccatgctacatcaaagaactagagttcgtgacccagacattttctcatttttttttattattttttaactaactaaatgtggcttatattttgtgccctatacagatttatgttcaagatccgccactgctcggatccatggtttatgattggtgactttttaatgaaataatcggaaatcatgagaagaagggtagtaaaagtaggtcggaatcctctttcctcccatttcgttgtatgattgaaaattgtgggatgattgatgtgtcatctcatgggaatttgttttcatgggtgggaagacgtagttgtggagttacggggcggagagttcgtaagatcattaaatcgagattagatagagctatggcgaatgaggaatggcatactattttttcccacaccaatgtggagtatctcaaattatggggttctgatcatagacctctcctagcatcaatccaaaatagcccacaaaaatactttaaaccctttattttcgataaaagatggcttggtaagccggggtttaaagaatcagttcatggaggatgggatatcccttcacaagaaggagttcttttcactcaaaaagttaaaaattgtaggaaatccatttctctatggaagaaatcgagttcctcaaactctgagaagaaaattttggaattacaaactcagatcgaccttgctcaagaagatgagtctatctccgctgaagatctattagcactaaactggaagctttgcgatgcttatagagaagaggagatattctcgcgtctaaaaagtcgggagttgtggtttaaagagggtgataaaaacacaaaatattttcatgctactaccaaacaaaagagagcaaggaataagattattggtttattgaaccaagatggtctttgggtagacaaggaggtggatttggaaagacttgcggttgattactttaaagatttgtttaccacctcggagccacaaaacttccattccgctcttcgggatctgccagtgatgatatctgaagatatgaatcagagactcactaaagagatttccccagaagaagttaagcgcgctcttttctcgcttaatccggacaaagctccgggtccggatggtatgacagctctattctaccaacgtttttgggatttgactggaccagatcttgttaaagttgttcaaaatttccattcatccggctcttttgaagagcatctgaatgagacaaatatctgtttaattccaaaaacagacagaccacggaaaatggcggaattccgtccaatcagcctgtgtaatgttagttacaaagttatttcaaaagtccttagctctcgtctaaaaaagattcttccggatttaatatccgagacccaatctgcctttgtggccgggcgacttatcactgataatattcttatagctcaggaaaactttcacgcgcttcggacaaacccggcttgtaggaaaaagttcatggctataaagactgatatgagtaaagcttatgatcgtgttgaatggtcatttctttgagctctcatgttgaagatgggtttcgcccagaaatgggtagacttgattaatttttgtatatcctcagtctcttataaagttctcctaaatgggacaccaagaggttttatcaaaccaacaaggggaattagacaaggcgatcatatttctccgttcctttttatcttgtgtacggaagttttggtggcgaatctcaaagatgcggaatggaatggccgaatccaaggtcttcaaatctcacgcgcaagcccttctacttcgcatctcctgtttgcagacgataatttatttttttgtaaagctgatccatcccaaggtcaagaaatcatcaatattctccgcatttatggcgaggcatcgggacaacggttaaatgctgctaagtcttttgatgattttaaccatcaaagtttataataaaatggttaaattttgttaattaagtttataataaaatggttaaattttgttaattaaatcagtttatacaagctgttaaattgtttttaagtaaaagatggaagagttaactttccgtaacgtttcttatatacatttagaaagatatcttataaactttatgataccctacattgtgctcgttttctatttaattatatcttatatatatgtataagatttatttatttctcaaacgttatggaaagttaactccgtcatttttttgttaacgaaaatttatcgagatgcctaaaataatccggtaacttaactattttattataaagtcaaatcaaactttgacaaaagtttatgttttttcgtaccaaatttgaaagttcggcattttttgacattttcccaaaaacatttttcttaccttacgttttacgaacctattcacgaagttttctaaatttttgggattatcaaatcataatgaaaaatggttaatttctgattatttctataattgtgaaagacatcattttagcaactagaatgacctaatctacctaaatataatggttaaaaatatttcacaatgctgtactcacgaaaatataatacatttttttgaatcgtttatgttccttcttgtcgtttatacaaaactctttacaaatgacttaaccaaatttgtatttagcttcatattttggattaatattaatttttaaaaacttaaccaacaaattttagtaataattaattaattgtgagagatataataaattgtgtagtcacaaatatatgcggaaaagttacaaaataactttttttagaaaattgtatactcatgttttaagggataattactcaattaaggttttaaaagtttggcattattattgagaatggtgaatatttcataattctttttgtgattgacaagttaacattactagatttttgtaagaaatgttaataaattgtagattagtttttatatttataaaaaaggaaaaatagtctatttataaaacaaaaactactctctaccattttcgtacgataaattatttactttaaaaataaataactcgtccattggactagtcctaatctagtgtgtatatatatatgaatgaaaaaatgaagaatttttaatagaaccggacttggttattttgcaaatgggtccataggcatgtctgaggattggtggaatgagcggtgtaaggtaaataactcaatattaagcttcttctattggttcatgagtccattaatatttctgattagtgtttcttttcttgttctcattgtttattttaaggaatgaactggagctaagaaaataaaagataaactagtgccaaacatagctgtgatgcaaaaggtatttggtacgtgtcatataacaggagctgaagggtggactgcttaacaaggcaaaaagactctagacaaaacaatgtctttgtatgaagatgttgatcctgatgtagatagtgatgctgaatcgaggcagattcctcctactcaagatgttgatcatgatgccgatgctgatgccgaatcatggtagatccctcccaatattagcaatggtccctcaacatctaatattggcaatggtccaaaaaacgatcaaagtttgtaccagcaggaggagaagttatagcagaagtgattaggaaaagtgttgagtcacgggataagattatttcccgcaagaacgaactaatagagagacaccctgagttaacttgtagtcatttttgagctatggaggttctacattcactgcctacaataaggatgtggtatcctttgtacaacgcaacaattcaacatctcaaggaagatattaacaattgtcagaccttcttattttatgaagatgatgataacaaggttctctactaggagtatgccactagtgaaagcagggatgtgtggtgaaagcagtgtctagtgtattgtgtctttcatgtttctactttttttgtttgtgaacactgctgtaacacccctgaaccgttctataaataagatggacaagaatgccactttgataaaacttgcgaacagttaacaaagtttaacgaataaattcgaacctaagtcatccgtactacaagcgtatcccactcagatacggcttaggcttgccaacccttgccgaaaaagagcgtttgggcggtccataatcatttaaggacaagcagcgaaatataaaacatctttatatcacatatatgttttattacacaaatacattaccgaaatatataagttttgccggctgggagcttagactccaaaacatacaaccttattactacaaagttattttacatcaaggctagtaaacctacactggtattcctagcgtccaagcctcccctaaagtttaacccactactggtcacctgcaaaacaaatagcgtcatgaataatctaggattactcagggagaccggattctaacaattatattaacccaacccaacccctaatcacaaagaatcaataacaaaagattcactaacaataaattaaacaaccactaccaatccccagtctaaacatcctaacaggccactacgaattcatgataccccccaaggtgatgcctccacactcctagacacgtaagcctataagagattacatccctcaatactacatcgtcatgtagcgcttggccggacatgacccgctccaaacctttgtaagccataatgttacggaatttcacgcatcgcacagcagacggatagactatcatggtttacctaacaataggtaaccccctattgctatacaacaacacgcataaccatattcttatgctatccgacaacataacggttatgctaacaaacgggcagcataacgattacacagtcgttaagcctaacttcataaccaatcaatcaaccaagcataaatgattatgaaataataccaagtataaactagcaacctcatgcataatttaacataataactaaaacccaatctgtgtgctacttcacacagctcggttactcacaaagctcagcggaaggttttgggccgtgaacttctccgattgttctccgttttcccgaaacattttttaagtggtttctattcgcaggtgtatgttctaagggtcggaaatgtgggctatttataggtttttgggcgagctagttaggtgaggcgctggggacacatgtcgtggccgttgccactaagctatgctcaatgggcgacacccgaacctgacacatcgtggaggcgacacccggccgtgagtcaccgcccagctgtcggtagaacgtcctcagccacacattaagtcggcccgcttaagcacctccgtggccggtcaaggaccacttgatcttcgcgggcggacatggccgattttcaaccacagcaaatcggagcatcttacccacctgctcgccgccataagctggtcgatgacgtggccgactcttggccgcacctctactgcacacgccgaccatggttgaacacacgtatgcctcggccgaattcacgccgccacaggttgcccacacttcgtcctcagacacaccacggacgaggtccttaaattgttttctcgcaaagatccaacttaaaaattctcgcccacctctaagttttccttactttaaccatcctaagctaatcctaaggtttccttacccaaagtggctaagtcacttaccactggaacatgactcgttgaatagatgaattgccaaattcctcggattaagctttcccgtctatagtccacgtacggggcattacaactgccatctttaatagtaataaattttgatccatagctttttttgtaaatatattgcttggatgtgataaacaaaggggagcagttgacttacgattaccagtaaatgttaagttgtgtgatatttggtgcagatcaagattgttgttgtgatgtagtgtgttgccttaaaaacgctaggtgcaaaaccttgcaaaactaagaatagaaccttataagaagttgtggtgcaatgtgttgcagaaaaaaactaggtgcatgtaaagtgacctggaaaacaccaatggtaaatttgaactttgccttactttttcctagtcatatctatacttatcagttttaaagagttaagtgtttcaatattatttcgatattggactatgaatgctctatatagcaactgcaacttgtagcttgttcatctcagtgtgaaacctacaacttcacttttcgcttcagtagtgtatttactgtatgtagtttgcagttagagaaatagagatgtgatcatggactgtgttatttggttgcagttcttaaaatagcttcaacaagtggcgtgttacaaaactaaatagtactggtgtagaattgatcatcaaattatgcaggtatggatcttgtttcagatcgcttgttgaatcttccaccgagctcatagatattggactccctgttcattattgctttttgagattatttcatgttcatacaattacttcatgaatgtcttgattagagatctttatgtcgtgtgggtcgttgctagatgaatgccatgttcttttcattgtcgctgcgacaacgatcagcgatccagatttataactaacttgagacacgtggctgtggtgagtaacacacgtaacaccattaaaacattcgcatcgcctccttttcaccattccaactatcgctcatttttccagcgatacccgtggaaatgatcgcagctactccttttttattatcctccatttcttttacttctgttgatgttaaaattctggtcgcttaaagctgtcgcaacaactttgaaccgaacagggccaaaataaaaaatcaatctttttagggaactttaggtggcactgagtaatatgtgattctcatcgctgtagttttgtcttgaattttatctagctctgataacttaaagaaccgccccttgactccacttaatattcttgttttgtaggaaacatttagagctttaattgaggatgatgacatggatttggtactagaggatgagaacaacatgtatgctcttttacaagacatgtatagaggaactggagtgaacactagcagacaatgagtgaggacaaatagaggtgaaggttggcgtcgtgtccaacgtttatgtttgaatctaaggtacaaattcaagacatgaacgaatcaacatttaggagcttatgtaagacactttcagaacattataagttagaggaatcttgtcatgtttatcttgaggagagtgttgcaatgttaatagagatggttgcacaagatttaattgtacgggtcttagctgaacgatatcaacattcacttaacgtagtgaaaaggaagttatatgagattttgattgctcttttgaaacttgcagcaaacatagtgaaacctacaaggggtgatgtcacatatattagtctttttatacttgaggttaagcgctatatgccttattttagggattgcattggtgcccttgatggtactcatgtacccgtgcatcctccatcaaggtttttagagcgatttatatgtagaaaatccgaaccaactatgaatattctcgctatgtataattttagtctaaagttcccataagcctatgttggagttcctagaaaagcacatgacacgaaggtgctatcataatgtgctacccacatcactgtttttcctcatcctccggttgaaaagtataatttagtggatcctggttatccaactagaagtggatatttaggtcctcagcataggattagataccatttagattagttcaatagaggagaaccacctacaatcactaaaaaatgtttaaccataaacatgctagtttgagatcagtaatcgagagaacttttggtttgtggaagactaagtggagaattctagataggaaacatcccaagtttgagttgaagaagtgggttaagattgaaacctcaacaatggcgttacataattttatacgagattcagaacaagaagatagtgattttcaacattgaaaaatggtggaatcatatgagcagcatggtgatgaaaatgttggacatgttccatatgtacttgctggtgacaaaattatggaggctatgcaggattctatcactatagagagtcagagatggcctaaggaacgagacttccttattagcagaagttttaagacggtgtgttttaaggattatctatatttgataaaaccttatattggtgttgtttcatctcttttagcatatataagactgaagatattaacatttttggagtttgtttggtaataatgttgttcattaatttcataacatatgtttatatgttttggttcttatataagaaaaacaaattcatgaaaatgcaagtttaaatgtcaaataaaataatttgaaatttatttaactgtaaaaatatatttgattagtaaaattaacattactatggttagattaagaattaaaatataattagatgaaaacatggaagtttagttattttttcttatcaaaagcatctagaaggatcatcgagctgaacaaacaaacaaagttttaaagaaaaacagttagatggatctccagcttaaccaacaaaaatagaaacgaacatcgctcagatgaattagtcagatggataatttggatggaccatttagatgcatatccctaaggagcaaacaaacacgacgttaggtctatttaaataacctctcgaaaccaacattggtaacagagaaatcaatttccaacattgctatttgtatatcaatacatgggacagccacacacgcaaacatttctgatcacgagagcatttatagcatcaaagtgattttgaggagaatcatcaaaatcatcaaaacttaagaaacttaagaggactcacatataccatttgacactcaaactaacaaaagcaccaatcgctcatttccaaattaaaagaattgaacatctaaaacaagtatagaatcacaagtcaatgaaatgcctaaattgaataagcaaagagaccaaaactcaattaatctaaacttgaaagcaataatttgttaccttaatatcacaaaacctgcttcttgtccaatctttgaatcttgcatttgcaacttctcaggaagcaaccatgtcaatccctgcaacataagaaatataattggcgaattatcagctgtaaaaggcaaagagacaacccctaaaacagatgataaatagggctaatcatttcttcctaaagttcactagaaaccaatctattgaatcaaaatcaaagctatcacaaaaacagagaacacaaaagctaaaaagaaaactgattcactttaacaaatttcaaaactttctgtaaagcacacaaatatggatggatttatgaatcaatgagaaggcaagctccatgatacttagagattcaacgaaaaaaaatcaccaaattgagagtagctacacaagctaagagaacacaaatcaaaattttcaaaagatttcaatagctgtgaataacgaaattaccttgctttgctttgtgtatggagattctccttcaagcagagaacttcaaaagctcttcgaggtcaagaagagaacttcagaaacaaaacccactacttcgagatcgatgagcttactttgaaatcgcgagcagatccaaatcatgtaaaagagaacaagagatttcagatcgtgtaaaagagaagaagagaaaattttagatcgcggcgtaaatcgtgttggctttagggtttgatttttttttttgtgtgatttcttaaagatattaagcgtgtttaggtcatttgttacattaatcgcagctttttaatcgttgccgctgaattaaatcagcgttcaaaattactcgctgcagcattttgacgtaagtacgtgcagcaacaaaacgtacaacgtaatctgcgtttgccgcaaccgtaactacccgcaacgacgaaacgaacaacataattctaatttcggtataatggaatgattttagaaaggaaaaaaataatatcatttcaaatacatcatccaaatcattcgtttatataatttatttggattcaaatgaagaaaatgggcttttattttcagtaccactagaattactaactagtaactacgtatactactaaaaaaaccaagtgatttacaaaaaccgattattttttttatttcaactggcccaataatattttactcagccgacacatacatatgggctcttaatgggccatatgttaactatatcaacggttagggtttacatgaagcaattagggttttaagttatgccgcctcataaccatctatataaatacagattctcttcggtctctcatatcatcagccacttttctagcttattcgacctaatggtttacacagatacatttagtatttcgattctctattatcgtgtttgattgtttttggttattcggtattatgtctcttcccgatgaagaagcaatcccatagataggaagtgccgtatgacactttacacaacaacggactgaacgacgatgcatccggtgaaatctcccaatccccgatcagtcaaacacgaactcgtatccggatccaaacccccggatccgtttacggtcgggtactgactcctcggccgggtcttcaccgtacttcccaccgttctgtgtccgttgtgtggttgatttgacaagggttcgctgagggtttttaatttttggtttaagaaaaattgtccgatgccacgtcgacggtagctttagggcaatgatcctcgatgctacattggacataaacaaatgtacgtgtttcgcttactgataggaacctgtggatcttgaattgatttacgatctacggagccatttcggcgattacatttttttgatttgttttattgggatgattaccgatgatgattattgctaaactatggaattaccgtctgagtttattctttgacgagaaaaacgctggcttactgaggtttcccaatttttttgtaatcaagttttcaaaattattcaatttttgtatgtttttactgatgttggaactcaatgaagatgtttttcctttgtaagttcttacaagaactcaatttttgtcaattactgtactaattaagacagatgttggaactcaatgaagatgattgtcctttgcaagttcttacaagaacacaatttttcttaattactgtaataattaagacagatgttggaacgcaatgaagatgattgtcatttgcaaattcttacaagaactcaatttttgttaattactgaacaactttacacagatgttgaaactgttaattactgactaattaagacagatgttgatattcaaagaagatgattctcttgcaagttcttataagaactcaatttttgttaatttctgtactaagtaaagtagatgttgaaactgttaattactgtactaattaaggcagatgttggaactcaaacaagatgattgtccttcgcaagttcttacaagaactcgatttttgtttattgctgtactaattaagtcagatgttgaaactgtaattactgtactaattaagacatgtttggaacccaatgaagttgactgtccttcgcaggttcgtacaagaactcaatttttgttaaatactataacagaagtctaatgaataaatctataacaattattaaattaatgatctttattgaatctacagacaaaaaaaagtgataaaattgaatgttgaagtaatctacttccaacgatggttataaattagagaccacttaatcaaaaaagaataatcataaaccaatcaaagttttattattgattaagtttactaactatgtaggagggaagaatctgttgaggttaaaaggcaaagtgtagaactcttcattacgattatcacctctgaaagttctaaacttgacccaccaaggcatgcctctatctttctttgatctctctacttccattgtgttgtccatgaatactgcaatgattagaccaactgttgctggtgacatgaataacgtgttcaagaatgcgttgaaccatcctgcgtttgtgtgaactaatccgtaatgtctagcgtcccagtactgagcgaagaattgaggtatggagattccgagaaagagcgaaagtccggtgatcattaggtttctcattgagttcatgtttgtgaactgaagaaatgagagaccaaccgcagctgcaagaagagccaaccatacatgtattgaattcttatgtcttgatgatgatattgtctttgatgtagtaagtgatgatggtcttaccaacaaggccgaagaggatgcagtgcaacgctgcgtatatcgggactggtatcgatgcgaaaacagctccgaatttgcctgatcaaaacaaaacgaccaaaaccaaacgttaaggatcacaagagatagtacaatagtatggttcaagactaggagtatgagttatgttataatatacccaatgttgagaaaacaatcatgaagcctgcagatacttgaacaacacgacgactaccaactcttgttaaccctagaagtcctacattttcactgcagacacattcaactccttcattagagtgtcaaaacatagaacagtagcttacaagaagaagttatttaacttacactagaacagtagagcctgtgcctgttccaaatagaccatcaagcaatacaccaatgccctgagttttaagaagaaacatagcagaacatatgtaagatacataagaaggtgtgatatgtaaataaatgtgtttctttcatcaaactattgattcacctgccatccaatgcctctactcaatacataagcaggaggcggcgtggctatagctaatcttgaagccgcaatgtaagctccagtagactgcacaatccattaacttaaccatcacattttctcctctaacaaaatcaaacttaagtttacttgcaatgaatattaacaatgctgcttcattacctcgaccatggatacaagaaccgcagacatcatagcaaacgaatggcctactgaaaatgtaggaggtccccactggagagggtatggaaacttaaacctgatgacagattataagcagaatgagattatggaaaatgtaactacaatacacaaggatactaagctgtccaataccatggagctgttgaaataagattagctttgtctgttcgacaactatgctgtgtaagtgatggtttgcctctataagcaccacttgcggtcagaattacagcgtagatccaaacaattgtaacacagatcaatatcggaaatctttcaaagattgggacatctttaaatggtctaacatgttttagatactgccaagaagaaaaaaaaacaagatatgtaagagagaaaacaacttggaaagcaagcaaagaaagtctaaacaacacaaagctcttacttgggttagtccaatgacaagcaatagcatcggtagtccaatctcgatgcagttcccgagctacagaatcaaagtttagaagagattcttgatgttaatgcaaattcaatggtgtggagtggggctttgtatgaattacctgaggaaatcctcgctgaaacatcccgagaccaaccaatccgacaaccggtgccattcctagaggactgaagaacctacaagttgaaaaaggatcaaaagcaagtaatgaattgggataaagataacaataacaaaaacaaaggcaatgagtaccttgagaaaagaccccaaacttggctatatcctagaataatctgtatgcttgatgctacaatcaacgccccttgtatagcacgcattgtatgaataaatctctgtaacaaaaaaaacataactacattgtcgatatacatacaaaaacaaaaacgatcttgtcgagtatctttttttacctcatgatcattagatatcttttgcaaagaagagtcattgatgatataagcaatagggacaacataagcaagagagcctccaacaacagcaggcaaccttgtaccaaagagagcttgaagaagtgttttgataccagctacaaagagtaatgtctgtataacccgcgctctgtcccccttttagacaacaagaataagattagtttagcaacgatgttcttcaataaaaacatacaagaagcacacttacatcagagccacccatagctggaacgagcaatgcgggtataaaagcacttgttccaagcattagtatgtagttttggaatgctagtaacaccgtctcggctgcaacaaccaatcacttcattcaaattatcatatataaacacaatgagttagtgaaagcgattgctaatttttgcacaaactctataaaaggcccaccaaaaacactcaggttattatatttcctaataacgaataattaaatcggttcatgtggtcattagtaccataaacaaacacttattatattccattgcacaaaactatatagagagtgagagagagagaagagtacgccaaggagggttagagtcgatgcaatattcaaggtcttgaagctgttccattggaggatgacttatctccgccatggctacgccgccacacaaacaaaacaaaaaaacaaaatctccttttccgatgaacagacacagaggaggaagaagaagacgaagagtaagaagaagaagaagaaaaaaaaaagttaaaggttagagatataaagtagtgaggaaaaaggaaaaaaaaaaaggaatattttacggatttgcccctgattcgaatttaaaagcttctctactctgtaaacttattattctctctctctcttgtacaggcgtggcgttgatgagtttctttctctttctttacttttttttttttgaattaattgttggattattttacggatttgcccctgattcgttctgtctatctaccaattagatctttttttctaaagtggggtccatcccaacggagtcaattagttctcaggtttttttttttttgaaaattttgttgttgcatgagagagagatcttaaatgccaaaacagaatcttctacaacttgttttcatctagttgtaaaattttggacttatttattactattttacatacttttttttaagtttcagattttattttattttatcattttattcctctgagtagaaatacttttttttttgtaagtagagatcatattatttaattttatatagatttgtttttgtaaaaaataaaaatgtagtttcttaaacaaaatagatttgttcatgaggaaaatagttaaattttgtactagttaaaaaatgtattttcttaaacacttaagattctttgttttaattttcttaaagatttattttcctacttaagaaaaaattaccgtatttttttgttcatatccttttgtgaatcacatcgatacatttcagaaacttttagagtaaatcataatcgaatttcgccagaatattagttaattaactaagtagataatgaacaaaatgttgagagtaaatgtttgatgcactagttcaattttatttacaaaaactaattcacgtttcacatgtggtattttttttttttgttaaaaacaacttattcggacttgtgctaacgcccaatacacagataaaatccagttacaaaataggttaaatagaaaaagtcaccaacaaacataaagactcgaaccttgctactagtcggaagcagagtgaccgaagccttatatccggcagattcaagagtcacagctttacggccgatattatcgacaataagctttggacactaaaaacgttaataaaaaaagactccaaaattttacattttaacaaaccaagaaaaatgaaaaaatatgagttaattaatgtcaaagattgcatgaaaatctagtcgtcagtcctctaacatgctttccgagatctacatttttggttaaatatctcattctctctttatagtaaaaagagccatccctaattaaatagttgaaattcgcaaaccattggacagaacataaatatcattcggcatgcatatggtttttctgtcttttgtgtgggagcacgtgttatcttccttaattgtgataagcgatacgataaatttatctaccagaaaacataacaagaataaagaatgcatttaatgtcgtcccaaaacctctccgggagaaagagactgcgtttttaaacaattaagtttacaaaaaaattcttaaacaattacgaagaagtagaaacaaactctcatgctcaataacaagcagataaaaaataatgccacttacacagaatgtttttgtaaattattcctaaacaaaataataatcttttttggcagattagagaatttgtttaaaatcttttaactaaaaaagaaagaaaagaattcaaatgaggtaaattcaaaaagtcttcatgagttttttggaatcatagatatcctggttatatatttttaaaaattatgttgagccaaacggtaaaaacatgaccaaaacgatgttgtttggtttgttgaattgtacacaaaagaaaaaaagtttggtttgttgaatagacgctttgggaccaacgtctttcgattattgatctaattggcatttagtcaacacatattagtattgacttaattacggcgtttaggtcaatacaattttgcttgattttattagttcatgtaggtaccagcttttttattgtagtcgtagggcaattttccttttgggtgatttaaaaatctatacaggaaccatcaaataattaagaatctatacatgaagatcatttatttaggtatctcttttcaactaaaatctatatgacaaatatacccctataaagagatatgataaaactctggatagttagcagataacgcattatcgagataatattgttagcgaaatatggatagagtttgatgcatagatgaaatgacatggtgtacaaacctacttaatatgttaataatatatttgaggatataaacaaattttcagttattgaaccaatgtttagatttcaaagacacatatatatgcgaagatgataacattaatattaaaagataacaaaatatttagcatgaaggccaaaaaagttgacttgcgactgaataatcatgtagaaaaaatacaagcattagaatagttagcagataacgtattatcgggataatatttttagcgaaatatggataggattttgatatatggatgaaaaaacttaaggtacaaacctacataacatgttaataaaacaattgacgatataaacaaattaccggctattgaaccaacgattgatttcaaagattatataattatcggaagataataacattattattaaaaggtaacaaaatatttaacatcaaaaacaaataaggtataggggtataagaatattttcttgatagagagaaggttcaacagtagttttttctaacacttaattttgtaattttctattaattttgtaattttctatgtatacagagtgcaatttcccttctttctttcttttttgttgtcgaagagttatctactctatgtgaatattatcaagttggcaatagtttgtgaaataatagtccattttccctcgtgtaatacattttataacaataaacatcattaacaaacgaaaagcatgtgaaacataaaaaaataagtattatcatatattaaactttcacgtgattgtaagtaacaaaaaagtgaagaataatgcttaaggtgaaatagactcacaagtcacaacttcgaccatacgacgaagcaatttagagcagacaatttcataatcagtttctctttgaactttcatcagccttatttataaatactatatccttagccgcatgcgtaattttatatttttattaaaaaatttaaattaataattttttaagagtttgattacggatattaaataagatattaatttaattttagtttgagtttttttaatgcataagctacgtgtaattattttagaacagaaaatccaacaatcttatatctatcataaagtctccgttccataacccgtcccgtataccagtgacggaggtagagctataacatgggggtcaattgacacccatggatttttaaacttacgttagttttgattagttatcataaattgactcctttacaaaataaaatttgacttccatcaaattttagtttaagagaaaaccacaaaatatttattatatatcaaaagtatccttataattaaactcattgctctatttcaattacaactatccattgaaaaacatggttgaaagtaaaattcttaagtaagaatttatatactttttaatttgacgtaaaatatattgctcgtatatcacaaagaaaaatatgtctcatcttttaatttatttatttgaaaattatttttgatttttttttttttgcattacatactttaaaatgacgtcacgtaatacatatcgttgatagaattttatataattttctagttttttaataaaaagtacttaacactatgacaaacgaaataaaataaaatacttacatgattaattctatgagtaaaaaaaaacattatatatagaaatttattttttcttaaaaatttatgtactttttgtattaaataatttgacccccataaataatttttctggctccgccaatgccgtatacagaaaataaaaatattaacattccgtatccatcgtaaatagaatatgtgtaataaaatacatacgtgtaggttatgtgtaaacaaatttaatttatataatgcttataatttataaacccgaactcatatcagttaggtaatttgtttagttttcaatttagtttcaatctacgtttccaatctatgattatatataatgtccttttagctatcttccgtgattgattcatattatgtcgaggttgatctcaaatcggtcgtactatttacaatcatccataactcttccaaacgatgcagtttaaatatgtacgcggcgatgcacatccatataaatgcatgatctttacctatatgagtagccaatttcctcatgaatagatctaaaaaattattaacataaaactattttaaactttcagtaatcataccacaataaaataccaaatactttgaaattaatatgtataatttattgtttaaatattttagaaactcgctgtaaatgaagatcataatgataattactttatttttttttatcgtttgatcttaataaatagtaaatataaatcttggttaatatatatctcggtttttagaaattgtgaaataagttttgttttatattttaaaatttgtgaaaatatcataacaaaattgaatcttaaaaatatttgtattaagtttttacaaatttaaattcaatcataaaatcctccattgaataaaaaatttaaacaatcgtgtttttaattttgaattaaaatgataattatttttattttcattttgaactaactgataatcagacctccacaccaatttgttatcaacccaaaattctaaaaattgaatttctttatcaatggcaaattatgatttttactaatggtatcaagcaagttttatgcttttttttatagtaaaaattagtttccaaaatgttaattaaatcttatagttactggatatcaaatcttaccttttcaattttcattggttaacaattttttaagaattaatttaaaaatttcgtccataaataataagagagataaaatgagtttaattcttttagaaactaataattatttaaaagtattttttgatttttatttaaatatattaattttgtaattactattatatcattaataaattaatataaaatactaaaattaataatctatactattaattgagaatcattgaaaataaacaaccttatgaaggataaaatattacatagaatgccattgattgttagtgtttttaaattaattcatcaaggatacaatagtaatcacaaaattaatagatttaaatataaaaaatggtaatattcttttaagcaattattagtttcccaaaattaaactcactttctctttcctattaattatggacgaaaaattaaaatttgttaaccaataaaaattgaaaaactaagatttgatatcaaattatattatattattaaactaacattttggaagttcatttttatttaattttttttaaatcataacacttgcttgataccatgaataaaaaatcataatttgtgatagataaataaattcaattttagaattttgggttaaatattttgaaatataaaacaaaactttatttcaaaatttctaaaaacgagattagatgttacaaagatttatatttactatgaattaaacaaaatattaatttaaaataattatcattatgccttacatttagaaatatctaaacaataaattgtacatactaatttcgaaatattttagattttatttttttatttttttaaataaatccataatatattattgaacaaacttttgaaataatgtaaactaattatacatttttcattcaaaacaaattatccagcaaaaataaattgttttatagctgtatttcaaaattttaattatattccaaaaatccaattaattatgattaaacaagagaaagaagaatattaaaaatgtagctaaggaaaaattattacatttgttaaaatatagttttttacaaaattatttgttataatgctattcatattttgaatttgaagaaggaaaaaaataattaaaaaaaagatatttgtgtgttttaatgatatatttgtaaactttaacatcctatatgttaatccgcaaaactcagtcatatatacattggtatttaaaggtaagcaaataagaattttagaacgtacttttaatggaacgaaatgaaaatatgaattataagacacaaacgacatgaaaagtagaatattaaaaatgtagtatttttatgagcactatataaaataaatttgtttacacacataaccctgcatgtacgtattttgtgatggttacaggttggtagtatttttatttcacatatatagacggggtatgggacgaagaatttatgatagatacatcacaggttttctattccaagaaatataatacattccaaaaaatttatattttgtacgtatatgagagttcagatatctaatacattgtactataatatatatcacaaaataaaaaaataatctacattgaattaaaaatatgaaattccgcacgtacgtgcggatcaggatgtagtattttatataacagtttactcttcaattattagtgtagatatataatcaaaaacttgaatatagtattagggaagcataaaatctttttttgttcaaacccgtcggtccttttagcggccaccgactgtttttgcattgaaaaagattccaacaaatgttttcttttagagggaatatatgcttccaattttcatattttattgaaaaccactaagaagtaaagaagtgtgtttagttcatttttttttttggtacaagaaacatagaatctgagccacatgtaaagttggaaagagggtttgagtatctatcttgtaatacaaaaatacaacaaattcgattctcttggagtgaaagtgttttgagtaacaacttaatatggtttatgcagctaatatagttagttagcaacataaactatactacattatgaccaaaactaatcaacacaacaaacaaagtgctgtcatacattggtttggcaaacgaaaatcaatgaaattttatactcagaaatgtgaaatggggagtgtggcgtttgcattgcctcaaacaagaagcatagtaaaaaaatgagaaaagaatggaacacttctatggtattgatgactcagtatctttggcaggtccgatgtaaactgtgtagcctaccgataggagaatgagcaaacacccaacaagccggctaaacaaacctggcgatcctgtttttcccgtgctgactaaccataactgcgataaaaccacctaatacgagaaagacactaattaaaaactaggtctttctgatttatcactatgctctaatcctgttcaaaccatctttaatcttaaccaaacccaaaccaaaaaaatcaaagagagaaatgaacttactaaacaaaaaagagtgtttttattgcatagcttaagagtaaaaagagaaataaaccgataaaaaaactgtcttctatggaagtggaagtctacctcgatgtacaatacgttagcagctttgctgattttctcaagctgaagaccacgtgccaaaagtaccttaagacaaaggaaaaatattctcagcagtcgagctatgcgagttacctacacaaatgtgtagaagcagaatgttaccgaatgcctcacctctgcgcaaaacgctagcaaccctagcacaatcatgctaacgagcgtgtcaaatgctggcagcacgaagctctgtatgagaaaattcaaagttatggatcatgagtatgagtaatgatcaaacaatagatcagtgactgcgttatacatttggtgcagataatgcatttcttggtttcctacatccatatcatattccctttgaacatacacaatatatatttacaaaacatacctcgaaggaaaacatgcaaattgctgtagcggggcaagctaccaagccaaaagagaggacagtaatcctgtgaaaatgcacatcatttgtttatccttcctaacaatagaattttcgctaaagaagtaaaacatgtgggttgatgacacatctgaatcttaaatctcacactggctgttccgatgctttagcggctgcctttatgagacaataggtgattcctccagtgattgatgaaaataaacccaacaagaacgcataaatatgatggtttcctttaaggttttcattctttccttctaatccaactgccaagaagagataagtaaaatcaacatgacatattcgtttcctcatgcataaaggacagccaggagaagttttattaagagaataaatagagaactattttgttaactcacttctgtaccttggacagtaagtgttgggccaaaaataaaaagcacgccaaagaaactgcaagcaagacctggaccaaagcgcagtaaaagagaagtcatatatagacttgctttgtatgcatacaaaatcatatatagttaaggatgatgagaaaagctctgaacctccaatatcagttattttcaacttctcatgcataacaacacgtgctgcaatggaagccataattggattcaagaagcttagtacaatagcttgggacaacggcaacatttgaatgctgtggttcacaatgtcaattaacagtgaaaaacagtgttagaagtcttactttgcaacgaatgacacattgattggtggggaatggacattgtttctaatagcaatttcagttcaaatgatataccggtcaccagtatataaatttaacaaaccatcttcccgagaagctactgagagtaggttatccgtacacagggagcagagtgtgagatgtaattacctaaagatgaaactaaacaatgaaagataacccacgagggctcttgaaaccaaaagcttccttgcatgagcaggtccaaatatcggttgcccaattcttttcaaccaaaggtatgacagtatcaagataattgtgcatctcatgaacgcggtctcaaacaaaggaattggctgaactgtcacaaacaaaggaaattagaaaaaaaaaagtctatcaatatactaatacacctgtcagctcaaggcaacactaaggttagcacttgcactcatctaaggagagattccattacaactagaaaagacaagttcttagataagtccactgtttcagaatcaaacatagattctcccaccatatgaacaaagcaaagataatttcaacattttctagccttcccataaagctaactctttacacaaaaccatgaaactgaacacaaggacgaaatcacaggatacaccattggagagctaaagaagtactgaccagaaaaagtatctgaaactaactccatgatcagatacaatgtagatgacaatgccatacacagtaagccagagtaacgagaaccactccaaatccatgaagaaaactgagttacaggtgatatctcagtttcagtcactttaatcacttgctcctacacacatcacaattcaaaatcattcttacttaaatctgatcacagttcctgtcaatcacctaattctacaaatctagcaacataattagcagaaactgaatccactcgcaattccattgaatcaatttcgaatcgaattatcgaaattcagctgaattgttcatgaattacaaccattgcaacgagaggagctgttcttacacttggtttgcgtcgagtgtaggaggcggagaagatgttgattctaggtctttggttttgattcaggagagggataatttcgtcggaagataattcaggggcggaggaggcgctttctaacgccgtagattctagatcgcgaacggtaagctcaagggagaggtgttcgtcggcgattctggtctccggagacgaagaagccatggctacgaaaacagaatctaacagacgaaacggaaagataacgaagagtcaaaagacgacgacgtttcaaaatagattgttttaacgtttgccgttaaatgcgacgttaacttcaatgacttttcatttttttttttttttttttttaaaacaacttattttcattcatttaaatcaaaccaaaccaagtacaaaaaaggataacacaaaaatcataaagtttaaaatacaaacaaagaaggcattcctcaatgccaaattatgatagataaggtgagacgacggtgaattcatgaaaactttgagacaaaggctattaagcgttttgagacatgtgaggtcatggctagtcgaatgatcttccacgagtaagtcaatgggagacaaattggtcaaggtcaagagacgaggtgacgttgaagatggtttcataaccgaggttctcgccggcatgagaagggtgagcttgagttgctcaacggcaaggagttggttgactatggttctatggtcggttaggtttggagataacaagctgagaaagcttcggtaatcaccgctccattgagacgggatcatgatgccgttcttcctcaaccttgtaacctcatgaataccaatattaaagttgttggatcgaacttgcttgatttcagtaaaccgaggaaaggaggcaaaaagattggagaagcgtcggtaatcatcgctccgtggagacgagatcataatgccggttctcatcaatcttttattttcaagagcaagcgatgaatattcaggattttcctcataaagaatggaagcttctgtgtagtaccgatagctatgagtcttaatgttgctattgatgagagattgcttaaagttggtagcaaaatgtgtcagagataagtaatttgtgacgctttggtgacaacagtcacaacctcgaattattagaattgagaacaagatacctatcacactcaaacaattgatttcatgatcgaagaccttaggtgaaactaaaggcagagttcgcaaagaattcttaagcacccatataaaaactggtacataacggtccatttgacgtccattatcaagtggtgccgataagtgattcagtattttactaagaaaaaacaaagaataatttaggtcagacctgggcttttgtgtatgaaggtttggatcacctttaataaacttgggctttcgacattttaatgggccagactttaaaaggtccaccagttgtaaacctagattcaccattgcttggtaaacgaaggtcttgggtgccgccgctgttgtacggagatgaggagggacttcgcggtggagcgagaatctccggtgatgatagggtcatggtttggatatcttggctgagaagtgaggcgaaagaggagaaccaaaggaacatggccgttctggtaattgaactcgaatccctgagaagaagctcgccgtggtgagggaaatattttcgggaaatcaagctcttagttcgataaatttgtggttcaatcagggaaagcttccgcaagggtggtgcatgttgaggatgagagatgggaaacgccggacaccaccttcttcctttattattgattgaggatttcaccgtaagcttaagggttgaaagggctaaagatggtttccaaaagggggaaaaattaagcaaaagagcagaaaaaactgaaagactagagaggtaatgagcaaattgaacagtgacagtggagaagttccgacgccggtgaacaaaagctccaccgacgccagagaatataactcgataaaggtttttgataatcgcagttggaagcgtgagagagagtttttatcggtttacaaattgcaatgactcttcatttaggctggattattaacattaactaggttttgagtttatttgatatattttgatgaaattatatttgagtgataattgttattaaatattatcttatgtaactatcataggttggtctttatttttttaatttctattaaagattttttttttcaaatacgaaattctaaaattataaaaattatagtgcttaagaattaaatctgattaaaagaatcacgaatcaatattgttttcttatattcaaattgctgccatcacttatttttgtattctcttcatatttctttttgtcatcttcttttttaatttttaatagccgttgtcattgttattttcactgtccgcttcttcgctacactcttcttcttcttcttccctttcatcttcctcattttcttcctcatcctatccatctttttctatgtaaaatgttcattattatatggttgaaaacagagcaaaaaatttaaacttactaatcttaaccaaacatacctcaatcagcctatgaattacatacatgaaatagtcgttcatttaaattttcaaactggaaatttgatacctttctaccaaaacttaatgtcatgtctcctaccaaatttcagattattcctagtatgtttggatgttcgtttgatgtctccacgggactggtcagatatgaaacttaaaaagaaatcttctcgatcaggttgaagacgattataacgcacacacaaaaacgtttaattctatatttcaccattcaacctaaagacattaataccaggaatccctacatatatgaattatagttgctttaaagaggtcatgtcgtaattgttttctcacttttcttttccatgtctgataatctgagcttgtcttagagtgtcacaatctgacctctacaagaaaacagtttatttcctagggaccgattcgttagtaaaccgtcggaaacaagcgtttcagacagatttccgagggatttttgtcgtcggtatgacgtggttggaaattatgatccgtcgaaaagtcctcgcaaatatccgagggatttccaagggattaatatttttgacggatttgtgaggaccactatttccgagagattcccaaaggaacaatatttccgagggatttctaagggagtaatatttccgacggatttgtgagggccattgtctccgacgactgttgagaaaattttgatgacatattttccgacggatatcctaggacttattatctccgagggtttttcgagagattattgtatcctagaataataaaattatttggttaatatttttaatttattgacgaaaattacttaattttcttattaaaaatatatcataattgagcatacttgatcggcttgtgatgagaggatgaatggatcatatccctcgagcctctttctcatgtgtattgttgtaacactgaattcgtcatgttttacaccatgtcaaataattggatcataccaatcacatgagaaaacaatgcacctcaaattgatcattcctggataacgaacttctaagattttgtagaggatatcatagtatacaagatcactagattgtgctgatacaccataatcacaagccggcctagtctttttgggttgaagaatcttaaaagcataaccacgagtacaatatatgggatacgcttccacaacatataatggcccattaacaaactccattaaccatgtaggaattgattgatctctagaagacatagatgtaacatgtagaacgtattttataatttgtaaaagttatcttcgcaaatttattatttagtaaaaataaataagaaaaagcttacgtagaatttcaaccagttgcaaaactcagtctccttgagtttttgaacgtcatgtggatattcaaagcgtatttaacccaagtacatcctgaaaattagtaatcatgataaatattagcaattttaattattatatgttacatattaaatttagaattttaataattcacaatttcaatgttaaagctaaaaatttgtacctttcataatctttaagctcttcacaattagtgataatgtacatgtgcaagtgttgatgctcctccactgttagccttcgcttcttcgatttcccacttaatcgaccaactttggcaaataattttgggtctagaaccgggtaaaaagatctctctccaccgtcatcatgtcgagcatgtttccgcatctttgtttggacgtgttttggaaaataatattcggagaagtgtgaggtttcttcgttgatgcattgtgcaacaatagaatcttcgactcttgccaaatttttcactttcttcttaagagtactcatgtaacgctcgaacggatacatccatcgatattgaacgggaccgccaagtgctaattcttgtgggagatgaattggaatatgttccatcacatcaaagaaagacgatggaaaaatcttctcaagattacataagatcaccggtatattttgttccaacctttgtatcccttatggagtaagtgttcttgtgcataaatatcgaaagaacacaataatagctgcgtagagaaagataaaatgtttagatataaataaatatatagttaagcataaaagaaaattgtgtaataatatacctgcaattgctttgtgtacgttatttggtagaagatgctcaaaatcaaatgaaggaggcgttgcataatgatatgacaatcatggcttttcattcattgaaacttcacctctcccattttaacgtagttgcggagattagatgcatagccatccggaaatttgacatccatcataatccactctaagaaagcttccttggaagcttcatctaatcgaaattgaggggttggtgctttcctatttggcatgacatgaagctttctttgagaacatatatcaggcaagtctagtctagacttcaagttatcttttgtctttccttgaacattaagtaggctctgcatgatgttatcaaaaaagttctttttggtatgcatgacatctagaaaatgcctcaacaaaaggtccttccaatatggcaataacaagaaaatactcttcttgtgccaattatgaagatcaccatatccatcaacagtatcgtgcccgacaccaccacaaaccgatgttttctcagcaccaaaatctcttaactggtcatcatgtcctcgccagaatactcaggaggtggaccatcaaagacttgtttattctaaataatgtagtggtctaacgataaggatggtcttctgggagccatcttctgtgacaatcaaaccaacacgtcttccgtccctgtttcagctgaaatgcgtcggtgttatcttgagaatgcggacacaataaccgtccgtgcgttgtgcacccagacaacataccataggctggaaaatcacttttagtctgcattatcaccgcttgcatgttgaaattttggtgggctgaaacatcgaacgcgtctacaccatgttcccataacatttgtaactcataaatcaatggctatagaaacacatcaagtgctttcttgggatgatctggaccaggaacaagaatggttaggaaaagaaactctcgtttcatacacaaagatggcggaaaattataaggtgtcacaataactagccacaatgaatactcccttccatgctttccaaaaggattaaaaccatctgtagacaaacccaaataaacgttcattggctcatacgcaaagttaggatacactgattgaaaatgtttccatgcttctacatttgatgggcgcgctattacactgtctgatgtatattcagcatgccatctcattgatcctgttgtacgctctgattgatacaacctcttcaacctctctgctaaaggcaaataccacatccgtttatatggtatgggaactcttccactagtgtcctgataccgaggtttacgataaaaacgacatgaagtgcggccttcgtcttctctccaataaatcaaacaattatcactgcacacgtctatcacctgatatggcaatccaagtccagctataagtttctgcacctcatagtatgaagctggtgaaagattatgttccagcaaaatttctttcataaaatcagtaatcgcatccacacaaccgtcagccaaatttagttccgtctttatctccatcaacctagtttcagctaagacatataagctgcatcatacaaagacatattagctgcatctaacatatcaaagaatctccgagcttctatattcggttactcttctctatttccatcctgaacaaaagatggtgcatttccctaaatgcatcgttcaccatctgaaatgtgcttacgtctactttcgttgatggttcctttacagtacccgaaatatattgttgactactactaccataatcttgcattgattcactctctccatgcgaataccatatctataacccggcataaatccattcttaaacaagtgcctctttactacaattacctcgagattcttattattcagacaatttggacaaggacataacatagtatttgtttctcgcattatgttctggattgatgcgaatgacatgaattccgtaagaccttctttgaaatcttctgtaagtttgcccgtctctcgattgtatctaggtttatccatccatgaactaaaataattataaggatctggagaagacatttctgttggtattgtttctagtttttttcttgttttccaaagatgtaaattggttggaatatataggcaaatttccgagagatttcctcgggatttccgagggttttgaatttacaacggctattcgaacgaatacatcaacgactacgttcgaacggctatattcaccgattggaaattcctcggaaaaaaacaacggtcaaaatgtcctcgaaaatctctcaaaatagtacaacggttaatatatcctcggaaaccccacagaaaagttacaaatttccgagtacatttgtgacggaagtatatttctccgaaatccctcggaaaatgtttaaatttccgaagacatttgcgacggaagtatttccgaagaactagtttccactcaaaaatttgtcggagaactgtcggaaatgtcgtcagaatacgccttgctttcttgtagtttcttcttcttcgcgataatgactttctttctgtatttctctcttgcttgtcgcaatccatctacctttctctctttctccttcaattacctttattacctagactataacgtcaattgttcataatgcaagaaaactctcatcaattaaatttattatctttattacgtctcgtaaatttatatatacaatctaagttttttttttaaaccacgcaataaattacctaggtcattaaccatacttgcatttatttgtagttcacgtaaacaattatcgctatattggcctaaacatctttccaaaaagaacttctttgcaatgtatgttcctccactcccaccaacactaactccctagatttattagcttgtaacactttctgggcataagcgattgatgttccatctgtcagaaacactgaataaccattcgaaataattttttttagcataccacacaacttgtcccaagtaatttgtattgaaacttttcaaaccaaaatccttaatgttacaaaattacaaattatttgcgtaggaaataaattgaacatggtcatatgtgtagataataaaacatgtctgcttgttgttgatccttcttgtttaaacccaaaattttaactcaaacaacatcaaatcaaggtcttatgtttcataaccgatatgaagaagcacaaacatcgaccaataacgcttgtcatcaatccttcttcttgagactcaaaacttttatgttaataacatcttataccaacacatgttttacaactcgtcaaagatataaagcaaaaacagtctgacagcgagaaaagtatccgtagtggcatatgcgataaaaatatatataaagcggcattattaagagtagtaatcagccccaatcgtgacagatgactcaagtgtacaatttataaattatgatcgaatgagatgcatctggtgattatatatattgaaaaaatctagtgttaattgaaaatattttcctattaatatttctttttttttgaaaaagaagaaaattaacaaaataaaaataagaatataagtttaatatattctatatattattttccaaaattttacatttctctttttcatatattattttttccgttttataaatatctttgtacataaaataataaaattttaaaatattaaaaatattcagtgtggttgctaaccatgactggtcgttttaaatctcatgtagacgggcctaggggtgtcaaaatggatcaaaattcatgggtcaactcaactcaactcaactcatgaaccctaatgagttgaaaatattaactcaaatgagttgatgggtcaaatgagttattgagtcaattggtttgatgaataaaatgagttgggttgtaatggtttacccaattaacccatcaagttttgtaaaaataaattaaaccaactaaaatctctaaaccaatgccgatttaagtttaaccaacacatctaaaccaatttaatacaatcaatatttttccgaatttcttaaatatataagcaatgaaattgagaagatttaaactcgttgagttgagttgggttacccattttgacacccctaagacggccttaaaagcttatcacttcgactttttttttttaagttgtaatagaatttttttgtaataaatatcttattttctaaactaataaaattttaaaataaatttaaattatttatattttcattttatgaattttgtaacataattatattcagaattctttcatatttttagatttttcgtttataaatttaatatcttattttttatttcttttattggctttttttttaatttttacaaaaacatttgaagagattatttttagaagttctactttttttttctttttttttttacttatgttttctttaaaagtttatatttttttatatctattgttatttttccttttttaaagtatcttaatatagttgtcgaatatgaaattatataatcagttattaatcctacaagaaaaaaagattttaaatactcacatctatataaaaaatatattatcttatattttttgtcactaaacaaattaatttcttcataaatactccactat

SEQ ID NO: 176 - DNA, 29078 bp, Arabidopsis thaliana
aagctttcaggatttggcccaggaatcgtctcaatctccatcgttgtaccatcattagatatacgtatctcttcttgataatcccatattctagcaaaatgagattcatgacttgcttttcttttagcttttagcaacctctttgctcactgatgcacactaacaatcatattgtaccccctcttaatttcatctaccatttcctgagattttatcttcagattcacactaagcctttcctcgtaaagttgcacaatagttccactcgtcaaaagctttgtgttaccagaccttacacaaatatgctcattctgaaagatccatatcattaacttatttttcctcttctcaaatgagcaatacactctccattgacatttttctttgatgtgttgtgtgcactttgccccaagcctatttgacgatgacttgtacattttgatatcgtattgagttttaagtgaatacctcaatagtgcattcttgatttcatctgcattgttgaatgtcttatgcaatgctaatagatcatcacaactctctctaaaagtgaatggtctttctactttctcttcttcatcatctgataatgataatggatctggtatcttcttgtcgtcccaaatatcatccccgttgctgtcagagtcaatactagttgcatctacactagcatcaagcccaaaatctttctttttcagctggatctatctctacctctatatatcctctgttatcttcaacaataactgggcaatcatcttcgtttacacaagaatcgtgagatgattcatctccttcgtcttcaatttcagtttccaatctctcatcttcaacaatggctttcgtttggatttcagattgccttcgaattggaagcttgagtcattttctgttcatggaggctatgtgaaattaatttctctttgttttgattttgttagaaaatcacctaggggtttgtgttcaatttgggagaaaactgggatttgcgattttttttagtttgatactccctccgtttcacaatataagttgttttagctaaaaacatgcagattaagaatatttacttttaaaaagttcagtcaataaaaaaactggataatagaaataatcgtaaaatattaaaataatatataatttacatagaaatttgaaaacaacttatattgtgaaacaaaaaatttggtctaagacaatttatattataaaatggagggagtaggttttaataatacatatataacgcttttgttaaaatgttaaacgttgactaatttattgtgtatacatgatatttggagaataaatttgtcaattataaatacttgtagatttaattgaccattttaactttgaaagctcaaatttttttcattcctaatttaaaagtttactaaaagtttcaattttttcaacattttttcaaaaaaagatattataccacaactattacgagtaactaacctacttgcatgaccatttctttactcattttgtttccgtagtagaaataattttttgttagttcgatactccctccgtttcacaatataagttgttttagctaaaaacatgcagattaagaatatttacttttaaaaagttcagataatcatagaagaaacagcataatataaataatcataaaatattaaaataatatataatttgcataaaaactagaaaacaacttaaattgtgatacaaaaaatttgatccaaaacaacttatattatgaaacggaatgagtaggtttaaataaaacatatctaacgcttttgttaaagtgttaaacgttgactaatttatgtcttaaattatgacgtcaatattaaattgaggaattattgtgtatacatgatatttacagaataaatttgtcaattataaatacttatagatttaattgactattttcccttgaaagttcatattttttttcatttttcatttaaaaatttactaaaagtttcaatttttttgacatttttttcaaaaaaaaatatattataccacaactattaaaagtaattaacttacttgccaacaaatgacgatttctttactcattttgtttccgtagtagaaataagtgtttttttagcagagtttctttttgccccaaaaaaaaaggctttattgtcgaaaaaaaaaaagagaggctatggtgtaaccatttattaatagccttcattcacactaacagtacaggcacgaccgcacgagcacacacgtgtggaaggagacaagagcaatgaggttaatgggccctttatgaacagtgagactacgtgagtccaaggcatgaggcatcgtggtccgcaaacggctcattttctgtcatgtgggtgccactcttttttgctcactttctcgatcccttcaaaattaagcaaattcaaagtctactattatttcttaaattttgtgtagctatcgtcaggaatctttagacatttttacacaactaacatttgtcttctcaaccaaagtctacaagaaataaaaatacttttatcttttacttgtatatatgttatcaaaaaaaaaaagtgataaattgacactaaattatgaattaatttaagtgattgactcattttttttcttattccaacttgcattttggattaataataaagttatatgttttataaaacacctaaaaattaagttttaatcttggttttggttttttctacagttagagaaaagccagcaaatataggtttttgttttttttaacccaaacttggtggggtcggcgtgcaatgttacctctattattgttttacttatttatttttgaacttattcatagtcatatactcattgatatgaacaaatgactaaaacttaaaagaatctagaagaaatttcatgaccatcacactattatctaaacacagctacactattatctacatactgctaccaataataaaataatcagaaatgaactttactcataaacaatatcattctctctaaacaaagagtagtaaacaaataatctatctatcaattagtttagtttgaacaactaaaaaaaaaaaatgattcagatccataaaaaccccatcaattccactcatgattacctgtaaactctaagcatatatacaaactgcaacaacatgtgaaaatatgggataatggagaaagatgatacacattatttgacatgtcacatgtgaaaaaaaaaaaatctcaatactaaaataagtacctaatcaattattcacttattaatttcttctggataataataagacccagtcttctttaccactctccacaacaccactctctctttctctgtgtctccttcaaatcttcatctctctctccatctctcttctccacaagaagctgagtatggatctcctcacaccactcatcttcctcctcctcctcctctcaccattttcactctcaggtaacaacaacattacatttcaaaaccacattctcataactctgttcttattatgttctgtctttttttgtataactctgttcttattatgttctgtcttttttttctttcttaacagatgctggttccatcggagtaaactacggccgaatctccgacgaactcccctccgcattcaaagtagtccaactactaaaatcccaaggaatcacgcgagtcaaaatcttcgacgcagacccatcagttctcaaagcattatccggatctggaatcaaagtcaccgtagatctccccaacgagttactcttctccgccgccaaaagaacttccttcgccgtctcatgggtcaaacgcaacgtagcagcttatcatccttcaacacagatcgaatcaatagctgttggtaacgaagtcttcgttgatacacacaacactacaagcttcttgatccctgcaatgagaaacattcacaaagctcttatgagtttcaatctccactccgacattaaaatctcttctcctcttgctttaagcgctcttcaaaactcttacccttcttcctccggttctttccgaccagaacttattgactctgttatcaaaccaatgcttgacttcttacgtgaaactggttcaagacttatgatcaatgtctatcctttctttgcttatgaaggaaactctgacgtcattcctttagattatgctttgcttagagagaatccaggaatggttgattctggtaatggtttgagatactttaatctcttcgacgctcaaatcgacgccgttttcgcagcaatgtcggctttaaagtacgatgatatcgaaatcattgtcacggaaactggttggccgtcgaaaggagatgagaatgaagtcggagctactctagctaacgcagcttcttacaacggaaacttaatccgtcggatcttgacacgtggaggtacaccgttacgtcctaaagcagatctaacggtctatcttttcgctctgttcaacgagaacaagaagttaggtccaacgtcggagagaaactatggtctcttcttccctgatgagaagaaagtctacgacattcctttcacaacagaggggttgaaacattaccgtgacggtggtcatactccggtcactggaggagatcaggttacaaagcctccgatgagtggaggcgtgtcgaagagtttgaatggttatacttggtgtgtagctaatggtgatgctggtgaagaaaggttacaaggtggtttagattatgcttgtggtgaaggtggtgctgattgtcgtcctattcaacctggtgctaactgttatagtcctgatacacttgaggctcacgcttcgtttgctttcaatagttattaccagaagaagggtcgtgccggtgggagttgttacttcggcggcgccgcttacgtcgttagccaaccaccgagtaagtataactttttttttgtgtgtggcgcatgttaagagttggtgtggggcttttcatgctaaactacgctgattagggtagcgtatttttagggtagtgtatgtgtggttaaattttgtgtggacgacacgacagaggtcaaatgttcccacgtgaacatagatcactagtgtttaatgtgacgtgggtttacgtcatcttggtgttaaagagaatcctatgatattttttttggggtttgattagatattttaaagtgtgttttatgaatctaattaagaagctgattggtttgaatatgcagagtatggaagatgcgagtttccgacaggatattaaggaagaagaagatttaagtttagattaatttctgctatataatatattcgttttttgatgtattttgtttggtgggaagttttagttaatttttgtaacaatgactttttaatgttgtgttgttaataccaacttagacgatgttattgatatttgatatttaggtaatgaaattaaatatgtttgtttcatattcagattgtcgtcatattgaattcggaaataagtgtatagctggattccaattccgaaaagaacagaagtaaagtgtatgacagcttttacttataatttgttgaagatatttttggtgagaatttatataaagtagtgtctacttgtaagcttgtaacatagtcttgttcgttgatattgggccgagaaattgttgaggcccaataatcttaaagattcacttgtaacttaggaaggccgaagggtattgttggtttgatggagtttgaaggatgagttttgtgtgtgcgcgctgaaaaatgtcttgtttatattttaatttgaaaatacctatgttagaaagtcttttttggaggtaaaaataaaaaacatacttataggagctattacgggataagtcatattttggatcggaaatttttaaaaagacacattatctatagacttttgagattaggcactttgtggaacatggaatgacgatattatccctctgcgacatgaagattagtttgggcgggatttgctttatttcaaaattttttataccgaaatctgttaccgtcgatcactgttcgccgttcagtggcctcaaatttggcacggttgtatatgaatgtgtgtgcaatgatgggggtaggtaatcttgcaaacacttgggcaacacttgggatatatttaagtgttgttcatgttgtgattttggttaggagaaattttccaaacactgcaaaatttcgttacggaaaagttgtgctagagagggaattatttacttgtgcaagaggaaacgctaaacgactccgttggggagctatgaacccacatgtaagaataattgtctagtagtttgtaataagtagccgaattgcagttttaaggatttacaatgttatatagttgtttgaaaagtagaagtaagtagaactaaatgtgtaagctatggatgctaattgctatatgtaacataatctaacggttttcattcagtatttagactcatatgttaatgtaagttgtatagtgttctggttggtaaccaaattcacaatatagtggcgtgaagtataaaattttgcaatttagctttgcagcctcatttgcaatggtaacaaaattatatgttactgtgacagagggaagacgtaaatgtctatgttatagctggttcgtgggaatattcagacaaaggcgtttgggaatttgtggttgcaaaggattgttatgccatgaccatgtgtatgaacccgaagatgacatatgtagagtttcacaaccatgttagttcagagtttgaacttgatgcagagaactggaaacccaaaattagttactggctacccggccaactctctgttttcttgtcaacactaggccgcctgtcactgttgctaccaacatggttgtaaggaacttccgtagggtaagggagagtgagcctcatataactttgttgctatcgcttaaagctctaccttacttggttgatggtggaagtgtggatttgttggcggtttgtggtaaggagaagagccaagaggatgagatgcttcagtcagagggtgggcaatcttctaagtgtatcacatatatccaatctgtagggtccaatggtgctgaatgttccacgaggaacaacattctccaatcagctgcgtcacttttaaatgggagcaactctgttgtaaggacatatactttggagtatgaaactggctctgatgttcacaactcaggtataatagaggttggttggccaacagttgtagaagagtgtgaagttgaagatgacattgactgtgtagtactagagatgaatgagaacgttggtgaacagtttctgggcaccaatgttagtggtataataaatcttgctaatgcagtcacaccataattgtcacactatgatgagatttcaaatgcagatgaggaagatgagcctttatctgaggatatgaggatgctaatagaggtagaagaattggagagagtggaactagcaaagcagaagatcaatgggaagcgtaaactatttgatagtggtgatgaggctgacaatacttcttacactattgggtttagtgaatctactccagatgatgatgatgatgattgggagtatgagggttggagccacctgatggcgaagatattccacttgggagtagccatccttcttctatagctcaaccacaagaggctgaaattgttggaccctctactgcaaaagaagacatcaacaaatctgttccgaattactagagagatcatgtaggaacaacagatgtggaggttaacacaactgaagacaatgatagtcttttaggtttgtctgatgctgagcccgtatttgatgacatctacatttgtagatggttatgttccagcgtcttctgaagaagatgttatctacatagggcggatgttcaaagacaaaaaccatatgcaaacaactttagcgatttatgctataagagactttttcatatcaagcagacaaggtctgacccgggaaggctggtatttgaatgtgttgaccgactgtatccgtggagggtatatgcagtttcaggaggacaagagtcgaagaactttgaggtctgaacactgactttaacacacacatgcataattgcatcaagaacacagtatgggaaacaagcaacatctaaagtaattgtgaaggtgttggagggaaagtatgtgaacgggatgtccggaccacgtgctgtagatatcccagatatcgttttaggtgagctgaaagtttcagtctcgtatatgaagtcaggttatgccaagagagcagcaataatgaaaactagaggaagtgatgaagacaactacaagatcttgtcaggatatatgcacttgctgcaaactcaaaacccaggcactaagtataagttacaatatactgagggtttagaatgaaagaaacagttcaagtatttattctttgcccttggagcgtgcattgcagggattaagtacatgaggaaggtggttcttgtcgatggtactaccatcaaacataagttcaaaggagttctcttaacacctagcatgcaggatgccaacttcatggtgtttccaattttgttgggtattgttgatagcgaaagtgaaccagctttgacctaattttttaggcagctgagtgccattatgccggatgctaaagatttggtcatagtttcagatagacatacttcaatatatgttgggattaggcaggtgtatccaaaagtttttcatggggcatgtgctgtgcacatagaaagaaatgtcagagtcaagtttccaaagaaaggggtgtctaaccttgtaagtaaagcatgtagagccttcaatgaaactgatttcagggcctttaatacagagatatggaggcgcaacagtgggtgtgccgattatttggctagaataccaaaagaacactggacacaagcgtactgtgaagcaaaacggtacaatctcatgagcagcaacattgttgaggcattaaatttagctttggggaagattattgaactgcccatagtgacattggtggaaggaataagaacgaaattgatgaagtggatctgtgtgcgacgtgctaaagcactgaagcttaaaaacggaattataccaaatgcacacaagctaatactgcgccatcatgcaggctcaaatggtttggctgtgctaccaatctctccgtggacttccaagttaacagtgttaatggaactatgttttatgttgatcttcaaaagaaagcgtgcagccgcaggcagtttgacaaactacagctaccttgttgccatgcgcttgttgcagctgctcaaacaaagattcacataccaaccttagttggaaactggttcaaagttcgtgtttgggaaaaatcttatgctaagtttatcaaacctgtgtctacttagggcaaagaagaagttgatgaggttattgaggaatccgagttcattccacgagatcatagtataggtcatggaggccgcatgaagaggagatttccctcagttggaaatcacatggtaacggaacattgaattataaacatgatacttttttactttgctatgtacttgagttactaacccaattgtttgtctgtttagggtggaaaaggcagagggaaggtcgtaataaatgtacaagatgcttcaaaccggaacataacatggcacatgtcctaaagcttgctgataaggtactgtggcacttggacatcttgtacatttatgtattaccttataacctaacattattaggttgtttaaacattgcgagtggggaaaacaagttgtttgggttacataagcaagcaatagtatggtgaaacttttcggggataagtattaagcaaaaactgcatggttgaccaacatgttttgaaaaatatgtttgctagagaacaaattttgcagaagacctgcaatggtgattcagtgttggtcttctggtagaacttcaagaatggtaaattcagggtcaagtagaacagaatgtgctaatgttgtatatagcagttttggtcttgtaggcggcgtaagtaagcggatatcttttgattcgactacgttattgtaagcttttggttcagttaatcactgttgatatcgtagtgtcatccattttcggttaatcactacaatgtaatcggtaaatcagatgaatgtaatcctctttttagtaggataatgaatataatggcttgcttatgtgtacgccttatttttttaatggatgttaatatgtggctagtaaattggagttttatgtatacaatttgaactgtagggagctcaaagtcgttgagaacatgcaataatggtgtttaaaacaagaaaaagcatagatagaaaattataatgaaagaaaaaatacaacagaaatcttggtgttcaaagaaaaaatacataagaaatctagaatgatattgaggtgttcaaagtagaaatacagagcataggtgaataaaacttaataaaggtcagagatttcaaaataataatgtagaggtaagcacggacaaacgtccaaagccgagtaatggactaaaccacacacaagaagagtcatgcccttgtagctgcgataagcatgttgacccagtgttcccataactcggatatgtgtgcatacctgttctgcgataacaattgcttctccaaaatttggaatcctatcgagaaaggttactaaaactcttattccaacttcagaagaaccacaaagacagaggaatattccaaaagaaaatcgagcatatatgctatgcaacgcagcttctctgagcatgtcgagtgactgaactgaagggccaagttgcgcagtaaggcgcaaccttctagatattttgttgtgttgttctcagcctcgagacacctaaggaaaaaaggacggtacgaagacccaggattggccatagagcttacaacaaagaacacacctaataaaacctcagataagaacgcattagagaagacaatgttgccgagcgtagttcctacagcgatgaacgagcctagtttgcgaaaaccagattatccaaccctcaaaacgatatcagtcaccaaagaaattggaatgtaagaagatatgtgaagagagatatgaagttttttgtttcagtgttgacaatgaaggagagcttgttctggtaaattatggatatgaaattaaaaattgtgtggtggttaatattaggagcgatggttgttcaaaagagttgttgaagtaaagttactaggtattggttaaatggagaagttaatgtagttggtgtaaagacagtaggtgttgggaaagaagagttaatgtgttgcttacaaggggaaaaaacaaacagtagaagacctattcagagtgaaggggaacatatgaggtgagcttaaaattaaaaacagatggagggagtggaacttgtagcataacatgtaattaaatagggaaaacaaagcatagaaatatcagatgaggaaaacatatggtcatacaaaattttgagtggtgaatgtttttaaactagcataggacaagatacatcatagagtaccagtagagcaaacagtcttggcatcgattgtgcatctgacagccagttagagtacaatcagggtattcatcaaaatgtcaagtgttgcagtgtgatcaaactttttgaggaccaatttgaataatctggtggaatacagtggtgacaattgcatcagccgcttcaaaagaagatgatttatctagaaatgcagcagaggtatgcattgtttcgtcatacttgccaagacaaagttccaacaacgatgtaacaaacgttgcatggggaagcgaagatggtatgattaataggagagctagaccttcttcagcacgcccttctctgcaagcaagtctaaggccttcgggataggaagtagttaggttttgtgcttccaagcaaagggcaaagaaaggcaaaagttggagcttaggttgatgaggccaacattctagaggaagggcgcaagagaaacttgtctgaggatagtgtcactgtatataaggttgcgatagaactttgaagtgaaaagcatccatgcaaagtcaataaatgaatcaaccccaaccctacaagcaatatcaagggcgatgttgaaatctatgttctccatgactgaaagtaaaatatgggattaatatgtgttagttttggggtgaggccttatataaagaagctcagatatggtgtggtaggtgaacctatgtattcatgagttatgggtggcaatttgatgaagaaaaaaaaaaccggtggtagttgggaaaaagagttggggttgacagtctaattagaagaagcaaagtgaaaaaggttgtaatataaacaaagttccatatttttgtaaagtggacctatagaagatcataacattgtataattgaaacaaggagagttcataaaacgaagcgagctattttaatatggtggtataggcaaagattacaatcgagtcattttagaagttgatttctacaatgtggagaaattacagaattacagttaacaagagagctatgaaactaatgggtggtgtctgagtataagaagcatgacatagttgggcatagatagagctttggctgagacagttctgatatcatactgatgttcaccaatgtcactcatgcctagcaaacacaatgagaaatgttgatcagctttaacagcttcgagcgctctttgacctgaaaagcgtaggcaagtagcaatagttagtgaaaagccgtgaagtaacctgagctggtaagagaagcaacggaacaaaagaacagaatatgagaggaggcgtacaattcatgaaaatgtgtttgctaataaataaacattaagggttggaacaagtaaatagataaacagaaaacagatattgcaactacgcataaattagaaggcttggaagacaatatactcagttacatacaagaaatgttccattatggtaagcaaggaagtttaaatgtaatacctaagaatccaaaacagagaacccacataaatattgacttagaccaaatataacattaaggtaaagagaattagcaaaaatataaaccctaaggcttggaaagaaggaacccaagcaaaaattgattaagctaaggaactgtaacattaaggtaaggagagtaccaccccaaatataaactaaggcatggaaactgggaacccaaggaaaaattgattaacgacgtggaatgtaacacttaggtaaggagcttgactataaatataaaccctaaggcttggaaagaggaacccaaacattgattgtcatagacgcaattttcaaatatatagcgtgatgattggaacatgggaacccaagcaaaaactgcaacatgaccaaaacatagagaatgcttaatcgaaatagggtttgcaacttgagaggaacatatatgcaaaggcttcgtatggttagagaaaggaaacatattatttgtaaaagaggaacaaataccaaacctgagaggagaagacctttgctatgaggttgtgaagatattcgatggggaagcttgcatacagagaagaataggataatgagccggacatatttccaaaaagaaagagagccggacatatttccaaaaagaaagagcaaataaaaaattcaacgataaaaactaatatatagaacctgagtgagggggacgaaaccgtttgcgccgtccaatttattccatagctttgggttagtggggcaattgcagagagggaaggggtagctccgatggccgaattggcgattgtagatcgggggtggggggggggggggtgggggggggagaaatgggaaaaatgtcaattaatctcccaactttaaaaaaatggtcattttatacatcaactttgtatgcggccgtttaaaacatgaactaaacgttgaataacttttaaaacatgatcattcgttgatcaggccaaactagacatgccgttatcagtcattaacggaacttttaacgtccgttatcatccgttaacgactttattagtcaagttttaaattgtggtcattttaaacatcgactttatatgtgaccattttaaacatgaactaagcgttgactatcatttaaaacatgagaaattcgttgaccaagccaaaatatacatgttgtcatcattcattaaaagaacttataacattcgttatcacttgttaacgactctattagtatccctaaaacgactttgttttgagaataatcaaaagaaaatcaagattgttttctaaatgaaaaccccaattctcaaaatctatttctacaaccgcccaaacaatacgaacagtcttataatgggtcctcaatttgcttccatgattccttttaaaatttaaaacaaatatatataaacgaaaacacctttatttgcttccaattaatggcactgcgattatctctatatcaaactatgttcttgggttctgcttaaaactttttgatatggagatgtcatatgggaaaaatctttatgttctaggttctactgataaagacatgtctattttggcatggtcaacgaatttttcatgtcttaaatggcagtcaacgtttatttcatgttttaaatggccacatatgaagttgatgtttaaaatgaccacaatttaaaacttgactaataaagttaacggatgataacagacgttagaagttccgttaatgactgataacagaatgtctgttttggcctggtcaacgaatgatcatgttttaaaaattagtcaacgtttatttcatgttttaaacggccgcatataaagttgatgtataaaatgaccatttttttaaagttaggggattaaatgacatttttcccgggagaaatggaggttgtgaagaaaaatcaaagacgtagtcttcagttacttagatatgagaagtgttggttaaacagtggtcttgggtgaatcagttggcaagatttttccaactgctcgtgttttaaaatcagtgagctgttaggtagcttttatgtttgcgacaatgttgggaaaaaaggcacagaatattaaaagggaaaaatgtcataaaaatcatcggtttgccaaagtggtgaaacaaacaccagctttgaatctggtgaattaaattctcaactatagttgacttttctattaaatcgttaacttttgttgactttgccaaataaggcatgtcgttaagtcaactgacagaccaaattaacaaagttaagtcaacgtttacattttttattaaattctaaaaacgatgtcgttttgtgttcttttataaaaaaaatacctccaaatacaacattggaaagaatcaaaccagtgaactcacaaacatataacccagtactcaaccatcaagctgaagtttttattgctcaatcaacacacagatacatatatcctctacagacagacgacataaaataaagtttactcatattcgaactaccaagtttggcttcgaactatactaaactctcaaagaaaaacatgctatttaaccaactgaactaaagaatttagcacgaaaaacataaacaatttttccgttttggcaaaaattttgtagatttagaacttgagaatcgatagtgatgataaatatgtctcgattttcaagcttgagaagtgtaaatctcgatcccaagccaacacaacaattccaattccaattcccagtacgtaacaatctgacgggctcagttctattcaatggtcaaaattctatttattcgtgtatgttatatatttctgtatgtattaaattatgtatgtgtacttcagcacggtggttaagtaattgatgtaatatttacgagatcttgggtttgaatcctaatggtgtcttttcttgaaaagatttttgtctttttttttgtaaagacaaaacgacgtcgtttttagaacttaataaaaaatgtaaacgttgacttaattatgttaaattggtctgtcagttgacttaacgacgtgccttatttggcaaagtcaacaaaaatttaacgatttaatagaaaactcaaataaagttgagaatttaattcaccagacccaaagttggtgctttgtttcaccgcttttggtaaactgatgatttttatgacatttttcccaatattaaaactaggacagtggtaagggtaaaatcgtaaaagactcacatagaaaagtacctaaatctattaggcatatgagatatgactgtttccacaaagggataaacttaattgtgctgatttcataattgatcctaattttatatacacaacgaaataatttatttggaaaggagttgttggaatgtggacttctgtaatccatcagagatgaaaactatactagtatttggatggatgtgtggggttttgatgctcatgcgtcgacatttaacaaagaaccttttaatcgatttaatctcaagatgtctcatctaataagggatcaagtagaatgggatccacaactcttaactaagtcttttccctccttgtgatggtatatcggtatgagaattagatctttttctcctgagccgtgggcatatactaaagatggtaactattcattcaataaagagtgggaactaattgggaaatgggaagaggtggctttggaaacaaaatacgtccaaccatcaagtttctaatcgtatgaccagtcaatttatgaggcagaacaatcgttgggttaaaccaaagcttggtgtattaaaatgtaatgttttctcattatcgattaatgatatatatcattgtggggaaacatggattctatggggctactttgaaactgtccttttatcataggcatgaccaaaatttaagtgtaatcttatttcggacggtaaccagatcatttccaaactataaacggatcgtaattgtataatacggttaaaagttgaaaccgttaaccgtaaaaatagaataattacgattaaaaagactatattaattgtaaccattaaaacagtaattaaccgtacagttaaccgcacgattaactgcatagttaaaaccttaaaaatataattttaactatttgtaatgcagagatagatatcgaatgttcggataaagattttttaaaaagtaaataatatcgcatacgaaagaatctacaacatactttttatcttattaaaagcaattaaaaataagattttgccaccagtattaaatatattgtaatcatcaaataaccataaacgtatttaactgtaactgtaactgtattcaaccgtaacattatctaactttaaccatcttaaccttatataaaatggttaaggttacaattaaaaaaattataaccgtaaccgtaataaccgtaactgtgatcatgcctactttatcatgcccgtgatgcgttcctttcgatggagaattggatagcgatgaaactccattgtatcctctggtggatccaaagcctccatgatcgtcatgtgaattcttttgaagtatggtcggattgtaatgcggttctcttggtcctagcaacactacaagattgggtgaagtagtgtgcatatattgacaaccaatctttgtagatgtgtagcttggttgagtttaaactttcttcgccaaaaccttaggatattgcttgtagtaattactaagggtggattccacttgatgaatatgaatcatgtgaacattgaatcattcagtgatacaagcaataatcacttgtagtgttttccttccattacttataatctaagtacgatgattacgatgattaataatttgtttattgtttaacgtcaatccgaagaagaggtggagatacaatagagattgcatgtacacacggccatcacttacaaaatccagtaacataatctgtgattaaattgaaagtcaacataaaattgagaatttaattcactagatccagagttcatgctttataccaacaaaaatgataaaatgatgatttaaatgatattttccccattgataaataaggtaaacaaaaatacacaataaaaactgacactcttacaataaaaataaataaaacagttacaatattaagtactcctacagatcaaaactcaagagtcatttacatatataatcacacaaatacatgtaaaaaaaaaaaaaaaactctccactttataaataaataaacaaaacagaagaaggatactataaaacctgcatccatgacttttgataatagttaaaaaataaatattaggattttcatatttagaaaagaaaagaaaaaaaaaacaattggttgttgatgtgaatgtgttgtatttagagtatgagaaatcggaatattctccttccacaaattgaaaccttcatacctgtaaaaatttagacaattattatcatttccagtaaccaaatttgagttaaatttacattgaaccacattataagaaccttaatcataatcaattattgagtaaatctcttttggcctcacataggttgaatccaagatcagtccaattctccaaatcccagatacatttcggtttaattttgggttcggtttggttcagtttatttagattttgtaaaactttaaccatactcaaccgaacttaattggtttggtttgtgtttgggtcagttttagtttgattcgggtcggtttggtattagttcggttcggtttttaattcggtacaaaaaaataattatttgtataaacggaacaataaatgaaatatgaaagtttttttgagttttactttaaagatagaagtagagccctaggtttttaagggttagagttttagaaataaataaatatttagtttagttatttatgatattattaatataattaattaattaaattagtaaatacattggattatcggttcggttcggtttaaaaccgaatcaaaccgacctatttaggttgagacaaaatgtaaccgaatggtttaagtttaaatttgagtttggtttgactcggtttgaatttggttgggttgggtcggttcggttaaaatctcacccctaccaaataatttgcaagtttaattaatccatgtcggtgacagctctatgaatctagatgccaataagacatgttaattgttaagtctatatcaacgttaatgccaaataaaaattctggtcccattcgaatcagaggggtagtttagtcttttcactttaaatcagaaattacaaaaattacgaaaacgccacgcaccttttagtgatctttccatggtctagtgaagaagatactctttaaccgattaccggcggcgagtctctgaaccgctttcttagcaccgggaacttccatttcctccagagattgaagataacgatcagctcctaaaccaatcaacttcgtcctcgccgcataacttccacctgataaaatcgccgtcacaaccatcaccggaagctctttattattcatcctctcattcctcggatccaacatttgcaccaatcgaatcacactcttctcatctctcatcaactccttccgatttgatctaacggtcaacaacgacttcgccgcctccgtcgccgcttcttgtaaccccgccggtttcggcgattccattaaccgaatcaacgagcttaaacaatcagcgacggctcgtttgttaccgtcgctgattgttaaattcgataaaagagaagttgagatctgttgaaggattacgtttccgtgttttatcaattcacctaatcggattatgaaccttgttgatgaagataaaaccctagaaactgtttccatggcagagatctgagagagagcaagcaaacagtgttcgatcgtatcgggatttgatgattcttgaactaaatgaatcagaatctgtaatcctcctctttctctaacaatcaaatctctgtaatactcaccggaagatgagatcaaggagatgaaattcgcggttttctcttgtaccgatgatgaaccggagattaagagttggataagaaccggtatagctccttcttcagctaatgttgttctgatttcttcaacggcggcgatgttgcttatagcaccagcgatgtgttcttgtacttgtttagatcctgatctacaagcttcgattaatacggttacgcctccgtaagctgagatagcccaagcggttgctggatcggcggttatagcttcaatcgctattgctgctcttgttttgaacggtgaagatccggtttctagcaatcgtagtaatggacctaatccgccttgttcgaacaccgtctttctcgagtcggcgctcgatgaagttaacagcgagacggcggcgagtgcgtgctcacggattagaggatggtgatggagatcaagaagagttactaagtaaccaacattaccttctttagctatgattcttgcggatttttcgttatcggtgagaagttgaagaagagattctagagatttctttttgaactcagctccaccgatttggagacgagtgaagaggtctctgatgaagaaggcaatgtcatctttatctgatgttggtggtgggagtgataaaacgatggcgttttgttggtggaggacaccggatctgaggaggaggtcaaggtcacttatgtgagtagagagggaagaggaagctatgtcgaggtcgctttgcatgagaagtttaccaccggagaatgaagcggaggagcattggtcggagagtgaagagaggcgttggagatttgagaggagagaagggaggagagtgtggaggagaggattttgtgaccagtgaggtgattcggataaggaagagagagatgagtttagtgtgaagagtttggatcggaggatttgccaccgtccgatgaaggaacggacggtgagggaagagaggaggaggagggagaggacgtttgttattaggtcaacaagtggttggagtggagctgttggtggttttgtgagttcgccggagacggcggcggaggagggatgcatggaggagtggtcacataagagaagggttttgccttagagagaaaggtaaagaagtgttgttgttagttgttgccgggaaaaagagagaggcgtgaggacaaggtctcttttgtctatttttacttttaggtgatgtgtactttgatgacaaatctatttctcttgatgccatagtttgtgtcagtcttatgcttatggttccggactcttttcttttacagcggtgaacgagtcaaacaagcttgatacacgggacacacacgaatataacaaggaacttaatagaatgtatagtagttattacatgggaatgtgacactattagacacttttggaaaatgttttgattttttaggcacttccaagagtttaggcactttactttatttttggtgagaaaatggacaaaattacccctgcgatattgacgtaaattaactaaccttctttttttattgtggctgattatgttctttttaatataaaccgttagattaaaaatatatattttcatatctatggctaagatgaaataaaaagaaatcattctctggttatctagatctgataagaacatctctctgttcttctctacaaagaatcatgtcttttctatcattctctctaaaataaatccaaaatttaaatggcgagttgaagatttgtaagtgttgagtgtgtgtgctgagagcaacgatggagtttgtgaagatagtgtaccttatgtatttactttacggagaaggctctctagatttcgattttgtgtaggtttgttacttttatttaacaaacacaattttgttttctttttttattttgtgaaaatatgattcacattagcgaaattgtgtgttgtgaagacgacgagatctgatgcatatgatctattctcgtagcctcaatctattgtcttgaatgtaaagatctctgcaaatttaaacaaaaatcaaaaaataaattttcggtgtacataataacaagtccattcatatgtgtccatagagaaactttttttactgagtcatatccattctacaccaaatttttgtataaatctgctccatctacttcattcacccaaataatctctacatacaacgattctctccctgaaaccatataaatatatcgtaatcataaaaaaaaggggtgataactttactaaacaataaaacacactcgcagcaaatcaaagacatagttgtccattgacgagtgtccaagaagtcaagtccaaatggtcatctagtaattaacataatcatttcatatcaatacacacgataatcatcagttaaaagtacaccgtccatttttctttaaccaatatttgcttatgtatggacacaaccatcattataaaatggatccataccctatacatagaatattttatccagtgataaaacacattagtagtaaacaaagacgatattgtccacagatgtttgtccgagcggtgcaatccatatggtcattgtttgactcatatggttatttgttctctgtattttaagtctctgaaattctaagatctagcaagtaaagaattggaagaaaaataaaagcttcaattaaggtttcagagctacgaaactcataaaattgaataatgaatgaagtttgggcagaacccatgatcttaaattacgtaagtaaacacatacaaagcaaaaaatctatggtacagatccttaatccaagtcgtgattgtagtgaatccattatcttccgcttgattttgtatttgtcgacaaagagagagaaagagagagagaagagaaatgaggagagagtgattttctgtttgtcgaaaagggagagaaagagagagagaagagaaactaggagagagacaaagattataaggagagagaaatagttaagagaagggtaaataggtaaatttatttatacaaagtgcctactttttggaaagtgcctaaacgtgtaatatgttatataaaagtgccttatagtgtaatattctcttattacattttcactattttagtttggaatttcggataattaatcgaaacaatagttttgtctaaccgatcgtttttaataagaatgggaattgtatatggttctaagctaatgattaaaaattaaaaatagatagatttacaaaaattgatcttcaataaaacttttgtaaagtaatgaggtatattttattaatctatcgatattaaatgtcgtaaatatgatatttaactagattttaacctgcggtacaccgtgggactattttattcttttaaaagtaaaaatttaataactgtcgattcaaatccgtcctactatctaacaccgtttagtgaaattaaacattttgtttttcttatttttgttttaataatactttaatttaaaatatatataattcaaattaatttaatttttttctttcaaatggttaaacattataaccatacattataatattctaaacccgtcccaccatctaatccagttcagtaaaattaaatattattttttcattttttgttctaataatatttttattaaaagatttataattcaagtcaatttaaaagttttattttgaaatggttatttaattttatagatttcatatattatatatattctaaacattttttcgttaaatattctaaacattttataactttaaataactataatatttattttttataaagtataatattaataaagtcataagattcctcctttttaaaagtaattagaattgatggagatatattggataaggaaatgctaataattaagaatattatttaactgataataattaatgccaatgacattccttataaatatatttcaatttgaggatttatttactaaaatgactgaaaaaatgtatatgtagatggtcgagagacaagaactacctaaatttacgcttaagagttagagtttatgagatgacaaagaaaaaacagttagagtttatgatgtttccttttaagtcttttccaagcaatcaatacaacaaaatctgaaaaatctgaaaatttgaatgagaaaagatgtaaggacacgtttaagtgcgcgatagatattacaggacgaattttaaggatgtaaacttttgagagtcgtttttaacaaaaatgaaagattgttttttagttttgagatttataaactaaaatgcaaggaaacaaaagacaaaaagtttacggtgataaccattgggtcattacgtaattgagagattaattatatatatgaaaatcgtatgggtgacacatcattacacaaaaaatgacatgtgtcatttaatattgattgaattaaaaatcagcaatcattaacacatgcatgaatctcctgctagcccatatcaaaagatttcaaaaactttttcacctcatacagtgatgagtgtagcacattatcctctaatagcatctccggcaatgtctctagaagatcgttgtgactcttgtcagaccagccatttttggtcttcagtgtaaacagagacataatcgcggacagcttgctatggttaaaacagcttggatatagaggtgtctcagcatctgcaagctttgcaaggaactcgtcttctttcttgtcgtcacgctctacaatctcgcccaagtgaaccataccagcaaactcttcgtccaaatactctgcagcctgatacaactcaactacttcatcattcaactgactgaatttgctttcactttcaccaccagacaccaattctccatgatgataccaatcacaacgcatcttataagcctcatccattcctcttctcacaagatgatcaacaactacacaacctaagtgacgatctatgttacgacaatcaatgcaaagatatacaatcatatccgcatctcccaaaaccgcagccacatcccgtacaaacttgatagcccgtctctcataagcatgatcatctctttgttgcagaagtagaaggaaaaaaaaaaaaaaactctccaaaacccttactaaaaactaaggaatataattataattatattccttacctgccaagatgcacccaatccttagccactattctatgtgctaaccgtaatataaacctttagtaacctaagcaccataccatatggtgtaaagaaaagaatcttctaaataaacaatcacacaataagtagacaacattcacaaataattcaaacttatatgtctgattcaatcaaagcaattcaggttttaagtacatactactcgattatagtagcagggtttaaacaaatgtaactcaaaagaatcttcaatataaacaatcacagaatacaacatttacaaataactctatgaaaacaattccgtagttaagtacaattactagattatattagcatgtttaaaataaatgaaactgaaaaaaatcttctaagtaaacaatcacacaacaagcagacaacattcacaaatcaaacttatatactaactatgaaaagagaaaacaattcacaaaagagaagatggttctaacctgtcctgtgaaaagagaaaattgataagcttcgaaatgtcccattaattcgctcagtaacgcttgcaaaacaaaattatagaatgagcaaaatgttttatattcaagaaagtgaatcaataatagtttgacataacaaaagaactaaatcgatttgacaataacaacatgattcagacaacagacgaagcttaatcaatctgcaatgaaattctcaagttttatcacccaataacaaatcaaacattacagagccaaaatccaaaatttgcaactcaaatgcccaaataaaaacacaatttcgaatgcaaaattgttcacaagcacataaattagcaacccacaaaaacattactaagacgaaattcatatgaattcgggattaacaaaggcatgcgaagtagacaaaattttaagaatcgataaagaaaaccatactacaatcacataaacatcggttattgagtctaagagattgatagaaacagatctagggtaacgaattgagtgtcaaaggagaaaaacaacaacatagataaggacttgccttcgattcgatcttgaattgagcggattaagtgctggcgggaggttccagttgcatggagagctttcacgacggcgacggagagtttaattggtggtcggaagagtgagttcgtcggactaactgctgcaggaccgagagagttctttcttagggttttcgacagaaagtttaattgtgttttgagttttggttttttgctcgaaaactaaaaaaattgactaagtgtttggcggaataaggtttttgggttcccgctcattaaaactctatcttagcgtttatcaagtgctgtaatataataaccaaaattacatgacatctacaattgcaattgagtaaaccgtgctataacggtatgctatcaatgaagactttttttgtagtgcatatatataggttgtgagtgtgcatcacgattttacagcggaacatgaaaaagtaaataaatgtctccattcaagcatacgataaatgcaaagtgcgtattaattagtggaaccacacttgacatcttcttattttcaattgaatatctaaaccgcacatgctttgatttaccccaattatgatgtggtttaggtgtggtttcagttttgtatgtatatatgtgtatatacatatataatatataatatatgtatatttttaagtttagaaaattatgaaatttattttatgtattaatcttatcaaataacataatcttgttcaaaaagtaatttgtttcttttacctaaaaattattttttttaaattaaaatttaataacttattattattataccgcacttgtaatagtcatcattcaagcattgtttgttccgtactaaacacacttgatccgcataataattttctctcccactaaccacatctaaaccgtaccgctttatattcttcaccgctttatgttcttcaccgttcaatccgctgtaggcaccgaatggtgacagcggatcgagcggtgcaggacaagcggattgagtagtgcgatgcggtttaagtgcggtaaattggagaaaaatacataatgcataacaagtgcggttattaaaaaataagtgttgcgggagaatgtttgaatggtaataaaatacggacaaaatagttatcaaattataaataatttaataatattttaagtgatcaaaataataaggaaacttaaatagggttgttttatcgataaaataaacacatagaatttatatcaacattttcagagttattgaaattatgtatattatatgtatatatgcagaagcggatctaagataaaaagttataatttaaacaaataaatttcttttatatacaacatgtctggagaaaaaatgttcaggagaaacgaaaagaaaaatattagaagtgcatcgaaccttgttcacaagagtttacttggggcacacctaaccatttgagctaacacattttataacagacctattaactgaaaaattattaatatttagtatagggcacgtgccccacctcagcactatgtagatctgccattatatatatatatatatatatgtttttgtatatatttgataaaaatataaaacacttgtatttaggtattcttagaacgcactaggcgtatagcaaaaacgcataccaaatactaatgttttatgaatttattataaagttattttatgtcccgcactttgcaaatgttgttgaatggtaacataggttgtgaactctaacctataaaaagcgatttttgaaactttttttttaatcaaaaacgcaatagtgttaccaatcattatttttatccaatttgcattttataaaaattgcagttttgtccaacagattatgccgtggaacgcatttcaaaacaaaccagtctttacccaggggatttgtcaaaaagcgcgacatgtaatgtttttttccaaaatttgattttttaatgttaaatatatattgtatgttatattacgagcaaaagtaaagaaaattaattatcctctccattattttcttgtttctaagttctcatttcttattttcatgtaataattgtttttaacacttaattcaatatatctgtctaaaacttttaatatatgaaatacctttgttagacttagttttttgttaaacacttaattcaatagtagtttttcttgtcttgtggtttttatgaatttaaaatttttatttttcttaacaataattatttcaaaagaaattattattttatatcaatttcgatatttaagatttataaatatatgaaaaattttctttattacccaaagaaacattattcataaattaaaacttttattacccaaagaaacatgattcgtaattcaaacattttattatataccgcaaatagtatttgtaccaatcaaactttatttttgtaccgattattgtgtactaaccgaacttgtcctgcaaacacgtttctcccacacgtaccgcagttgaaccgtaccacattacaaaaccatttttcctacacaagaaaatacgctgttagcatttggacccataattatcaaaccatttctaaactgctggttccgctcgtctcattcacagccatagtttgaatgaaagagatcgtgggattgtggattagatgaacatatctattgtaattttcttttttcattttttcatttttggctatgaatgggaaacctaaacgaactatgtggtacggttcaataatttttttagttaccatttaatagcatactttttacaatataactgttgtagaataaaataattataattaaaaacagaagtggatcatgtttgcacagaaattcagtgtgtggttagtatacgtcacttagaggttccgaatggtgacagcggattgagcggtgcagatcaattggatatacaaattgtggtgcggtttaactgcaatatgttaagaaaaaacgcagtatgcaaaaaatgtgtggatcaagcggatctagtagtgtatataatttatgaatggtgaaaaaagatgcggtaagatacaaatgtttgaatggtgaaaagtacaaaaagcggtttggtatatatatcttgtaaaatgtaccacttttttggagttctcttacaatccctaccacacaaagctt

SEQ ID NO: 177 - DNA, 121160 bp, Arabidopsis thaliana
aagcttcgattaatacggttacgcctccgtaagctgagatagcccaagcggttgctggatcggcggttatagcttcaatcgctattgctgctcttgttttgaacggtgaagatccggtttctagcaatcgtagtaatggacctaatccgccttgttcgaacaccgtctttctcgagtcggcgctcgatgaagttaacagcgagacggcggcgagtgcgtgctcacggattagaggatggtgatggagatcaagaagagttactaagtaaccaacattaccttctttagctatgattcttgcggatttttcgttatcggtgagaagttgaagaagagattctagagatttctttttgaactcagctccaccgatttggagacgagtgaagaggtctctgatgaagaaggcaatgtcatctttatctgatgttggtggtgggagtgataaaacgatggcgttttgttggtggaggacaccggatctgaggaggaggtcaaggtcacttatgtgagtagagagggaagaggaagctatgtcgaggtcgctttgcatgagaagtttaccaccggagaatgaagcggaggagcattggtcggagagtgaagagaggcgttggagatttgagaggagagaagggaggagagtgtggaggagaggattttgtgaccagtgaggtgattcggataaggaagagagagatgagtttagtgtgaagagtttggatcggaggatttgccaccgtccgatgaaggaacggacggtgagggaagagaggaggaggagggagaggacgtttgttattaggtcaacaagtggttggagtggagctgttggtggttttgtgagttcgccggagacggcggcggaggagggatgcatggaggagtggtcacataagagaagggttttgccttagagagaaaggtaaagaagtgttgttgttagttgttgccgggaaaaagagagaggcgtgaggacaaggtctcttttgtctatttttacttttaggtgatgtgtactttgatgacaaatctatttctcttgatgccatagtttgtgtcagtcttatgcttatggttccggactcttttcttttacagcggtgaacgagtcaaacaagcttgatacacgggacacacacgaatataacaaggaacttaatagaatgtatagtagttattacatgggaatgtgacactattagacacttttggaaaatgttttgattttttaggcacttccaagagtttaggcactttactttatttttggtgagaaaatggacaaaattacccctgcgatattgacgtaaattaactaaccttctttttttattgtggctgattatgttctttttaatataaaccgttagattaaaaatatatattttcatatctatggctaagatgaaataaaaagaaatcattctctggttatctagatctgataagaacatctctctgttcttctctacaaagaatcatgtcttttctatcattctctctaaaataaatccaaaatttaaatggcgagttgaagatttgtaagtgttgagtgtgtgtgctgagagcaacgatggagtttgtgaagatagtgtaccttatgtatttactttacggagaaggctctctagatttcgattttgtgtaggtttgttacttttatttaacaaacacaattttgttttctttttttattttgtgaaaatatgattcacattagcgaaattgtgtgttgtgaagacgacgagatctgatgcatatgatctattctcgtagcctcaatctattgtcttgaatgtaaagatctctgcaaatttaaacaaaaatcaaaaaataaattttcggtgtacataataacaagtccattcatatgtgtccatagagaaactttttttactgagtcatatccattctacaccaaatttttgtataaatctgctccatctacttcattcacccaaataatctctacatacaacgattctctccctgaaaccatataaatatatcgtaatcataaaaaaaaggggtgataactttactaaacaataaaacacactcgcagcaaatcaaagacatagttgtccattgacgagtgtccaagaagtcaagtccaaatggtcatctagtaattaacataatcatttcatatcaatacacacgataatcatcagttaaaagtacaccgtccatttttctttaaccaatatttgcttatgtatggacacaaccatcattataaaatggatccataccctatacatagaatattttatccagtgataaaacacattagtagtaaacaaagacgatattgtccacagatgtttgtccgagcggtgcaatccatatggtcattgtttgactcatatggttatttgttctctgtattttaagtctctgaaattctaagatctagcaagtaaagaattggaagaaaaataaaagcttcaattaaggtttcagagctacgaaactcataaaattgaataatgaatgaagtttgggcagaacccatgatcttaaattacgtaagtaaacacatacaaagcaaaaaatctatggtacagatccttaatccaagtcgtgattgtagtgaatccattatcttccgcttgattttgtatttgtcgacaaagagagagaaagagagagagaagagaaatgaggagagagtgattttctgtttgtcgaaaagggagagaaagagagagagaagagaaactaggagagagacaaagattataaggagagagaaatagttaagagaagggtaaataggtaaatttatttatacaaagtgcctactttttggaaagtgcctaaacgtgtaatatgttatataaaagtgccttatagtgtaatattctcttattacattttcactattttagtttggaatttcggataattaatcgaaacaatagttttgtctaaccgatcgtttttaataagaatgggaattgtatatggttctaagctaatgattaaaaattaaaaatagatagatttacaaaaattgatcttcaataaaacttttgtaaagtaatgaggtatattttattaatctatcgatattaaatgtcgtaaatatgatatttaactagattttaacctgcggtacaccgtgggactattttattcttttaaaagtaaaaatttaataactgtcgattcaaatccgtcctactatctaacaccgtttagtgaaattaaacattttgtttttcttatttttgttttaataatactttaatttaaaatatatataattcaaattaatttaatttttttctttcaaatggttaaacattataaccatacattataatattctaaacccgtcccaccatctaatccagttcagtaaaattaaatattattttttcattttttgttctaataatatttttattaaaagatttataattcaagtcaatttaaaagttttattttgaaatggttatttaattttatagatttcatatattatatatattctaaacattttttcgttaaatattctaaacattttataactttaaataactataatatttattttttataaagtataatattaataaagtcataagattcctcctttttaaaagtaattagaattgatggagatatattggataaggaaatgctaataattaagaatattatttaactgataataattaatgccaatgacattccttataaatatatttcaatttgaggatttatttactaaaatgactgaaaaaatgtatatgtagatggtcgagagacaagaactacctaaatttacgcttaagagttagagtttatgagatgacaaagaaaaaacagttagagtttatgatgtttccttttaagtcttttccaagcaatcaatacaacaaaatctgaaaaatctgaaaatttgaatgagaaaagatgtaaggacacgtttaagtgcgcgatagatattacaggacgaattttaaggatgtaaacttttgagagtcgtttttaacaaaaatgaaagattgttttttagttttgagatttataaactaaaatgcaaggaaacaaaagacaaaaagtttacggtgataaccattgggtcattacgtaattgagagattaattatatatatgaaaatcgtatgggtgacacatcattacacaaaaaatgacatgtgtcatttaatattgattgaattaaaaatcagcaatcattaacacatgcatgaatctcctgctagcccatatcaaaagatttcaaaaactttttcacctcatacagtgatgagtgtagcacattatcctctaatagcatctccggcaatgtctctagaagatcgttgtgactcttgtcagaccagccatttttggtcttcagtgtaaacagagacataatcgcggacagcttgctatggttaaaacagcttggatatagaggtgtctcagcatctgcaagctttgcaaggaactcgtcttctttcttgtcgtcacgctctacaatctcgcccaagtgaaccataccagcaaactcttcgtccaaatactctgcagcctgatacaactcaactacttcatcattcaactgactgaatttgctttcactttcaccaccagacaccaattctccatgatgataccaatcacaacgcatcttataagcctcatccattcctcttctcacaagatgatcaacaactacacaacctaagtgacgatctatgttacgacaatcaatgcaaagatatacaatcatatccgcatctcccaaaaccgcagccacatcccgtacaaacttgatagcccgtctctcataagcatgatcatctctttgttgcagaagtagaaggaaaaaaaaaaaaaaactctccaaaacccttactaaaaactaaggaatataattataattatattccttacctgccaagatgcacccaatccttagccactattctatgtgctaaccgtaatataaacctttagtaacctaagcaccataccatatggtgtaaagaaaagaatcttctaaataaacaatcacacaataagtagacaacattcacaaataattcaaacttatatgtctgattcaatcaaagcaattcaggttttaagtacatactactcgattatagtagcagggtttaaacaaatgtaactcaaaagaatcttcaatataaacaatcacagaatacaacatttacaaataactctatgaaaacaattccgtagttaagtacaattactagattatattagcatgtttaaaataaatgaaactgaaaaaaatcttctaagtaaacaatcacacaacaagcagacaacattcacaaatcaaacttatatactaactatgaaaagagaaaacaattcacaaaagagaagatggttctaacctgtcctgtgaaaagagaaaattgataagcttcgaaatgtcccattaattcgctcagtaacgcttgcaaaacaaaattatagaatgagcaaaatgttttatattcaagaaagtgaatcaataatagtttgacataacaaaagaactaaatcgatttgacaataacaacatgattcagacaacagacgaagcttaatcaatctgcaatgaaattctcaagttttatcacccaataacaaatcaaacattacagagccaaaatccaaaatttgcaactcaaatgcccaaataaaaacacaatttcgaatgcaaaattgttcacaagcacataaattagcaacccacaaaaacattactaagacgaaattcatatgaattcgggattaacaaaggcatgcgaagtagacaaaattttaagaatcgataaagaaaaccatactacaatcacataaacatcggttattgagtctaagagattgatagaaacagatctagggtaacgaattgagtgtcaaaggagaaaaacaacaacatagataaggacttgccttcgattcgatcttgaattgagcggattaagtgctggcgggaggttccagttgcatggagagctttcacgacggcgacggagagtttaattggtggtcggaagagtgagttcgtcggactaactgctgcaggaccgagagagttctttcttagggttttcgacagaaagtttaattgtgttttgagttttggttttttgctcgaaaactaaaaaaattgactaagtgtttggcggaataaggtttttgggttcccgctcattaaaactctatcttagcgtttatcaagtgctgtaatataataaccaaaattacatgacatctacaattgcaattgagtaaaccgtgctataacggtatgctatcaatgaagactttttttgtagtgcatatatataggttgtgagtgtgcatcacgattttacagcggaacatgaaaaagtaaataaatgtctccattcaagcatacgataaatgcaaagtgcgtattaattagtggaaccacacttgacatcttcttattttcaattgaatatctaaaccgcacatgctttgatttaccccaattatgatgtggtttaggtgtggtttcagttttgtatgtatatatgtgtatatacatatataatatataatatatgtatatttttaagtttagaaaattatgaaatttattttatgtattaatcttatcaaataacataatcttgttcaaaaagtaatttgtttcttttacctaaaaattattttttttaaattaaaatttaataacttattattattataccgcacttgtaatagtcatcattcaagcattgtttgttccgtactaaacacacttgatccgcataataattttctctcccactaaccacatctaaaccgtaccgctttatattcttcaccgctttatgttcttcaccgttcaatccgctgtaggcaccgaatggtgacagcggatcgagcggtgcaggacaagcggattgagtagtgcgatgcggtttaagtgcggtaaattggagaaaaatacataatgcataacaagtgcggttattaaaaaataagtgttgcgggagaatgtttgaatggtaataaaatacggacaaaatagttatcaaattataaataatttaataatattttaagtgatcaaaataataaggaaacttaaatagggttgttttatcgataaaataaacacatagaatttatatcaacattttcagagttattgaaattatgtatattatatgtatatatgcagaagcggatctaagataaaaagttataatttaaacaaataaatttcttttatatacaacatgtctggagaaaaaatgttcaggagaaacgaaaagaaaaatattagaagtgcatcgaaccttgttcacaagagtttacttggggcacacctaaccatttgagctaacacattttataacagacctattaactgaaaaattattaatatttagtatagggcacgtgccccacctcagcactatgtagatctgccattatatatatatatatatatatgtttttgtatatatttgataaaaatataaaacacttgtatttaggtattcttagaacgcactaggcgtatagcaaaaacgcataccaaatactaatgttttatgaatttattataaagttattttatgtcccgcactttgcaaatgttgttgaatggtaacataggttgtgaactctaacctataaaaagcgatttttgaaactttttttttaatcaaaaacgcaatagtgttaccaatcattatttttatccaatttgcattttataaaaattgcagttttgtccaacagattatgccgtggaacgcatttcaaaacaaaccagtctttacccaggggatttgtcaaaaagcgcgacatgtaatgtttttttccaaaatttgattttttaatgttaaatatatattgtatgttatattacgagcaaaagtaaagaaaattaattatcctctccattattttcttgtttctaagttctcatttcttattttcatgtaataattgtttttaacacttaattcaatatatctgtctaaaacttttaatatatgaaatacctttgttagacttagttttttgttaaacacttaattcaatagtagtttttcttgtcttgtggtttttatgaatttaaaatttttatttttcttaacaataattatttcaaaagaaattattattttatatcaatttcgatatttaagatttataaatatatgaaaaattttctttattacccaaagaaacattattcataaattaaaacttttattacccaaagaaacatgattcgtaattcaaacattttattatataccgcaaatagtatttgtaccaatcaaactttatttttgtaccgattattgtgtactaaccgaacttgtcctgcaaacacgtttctcccacacgtaccgcagttgaaccgtaccacattacaaaaccatttttcctacacaagaaaatacgctgttagcatttggacccataattatcaaaccatttctaaactgctggttccgctcgtctcattcacagccatagtttgaatgaaagagatcgtgggattgtggattagatgaacatatctattgtaattttcttttttcattttttcatttttggctatgaatgggaaacctaaacgaactatgtggtacggttcaataatttttttagttaccatttaatagcatactttttacaatataactgttgtagaataaaataattataattaaaaacagaagtggatcatgtttgcacagaaattcagtgtgtggttagtatacgtcacttagaggttccgaatggtgacagcggattgagcggtgcagatcaattggatatacaaattgtggtgcggtttaactgcaatatgttaagaaaaaacgcagtatgcaaaaaatgtgtggatcaagcggatctagtagtgtatataatttatgaatggtgaaaaaagatgcggtaagatacaaatgtttgaatggtgaaaagtacaaaaagcggtttggtatatatatcttgtaaaatgtaccacttttttggagttctcttacaatccctaccacacaaagcttcctcttacacaatgtacaacaattcgagtgcacgtggaattttgaggatgaaaataccctttgtgtgggtcaggtactgtgtctcagatggtgacaggttggttcggcgcaaagaagcagaaactgttcagtaataaatgctttccgttttcaattggttgataaatggatatttatttttaaaatggtaatatagtagggttagacactttagttactctattaatgtactagaagaaagaggttttatagaactgaatacaactggaaatctggggaatttaggagttgttgttgaagaaagggacatttactccggacgaggtaaaattgatagtgtggaattgtggtgattcgctttagtttggtagttacatttgtttgcttgtttgtgataaatgcaactacctcatattccaaaatggtaacttttcaatttggtaaagcctcttgcgaagtctatcccgattaaattcagggatactgggacttgctggcggatcaaagagcgtttcagcggatgatttggcggagacaaatgggtcgtcgtcgtcttcgaaggccatagcccgcctggcaccgccaagcggtgacttctatttggatttgttggtggaggacctcatctgtggtgagataaacagaaacaattactaaattattttggagtaatcgtacttgttgcgctagatgcgtttctctaaactgcaccaattaaaaccacaccgcacttttataaccgcttgtcccacattacccaaaccgcacttctataaccgcttgtcccgcattactcaaaccgcatttctataaccgcttgtttcgcattaatgttagtagttattaaaaataacttatctagtgtttctatttttggtgagttttcaatatttaagaatcataagactaaaataataattgaattaggccttgaatggaaacattataagtgcggaaatcaattgtgtttttggaaaaacgcgttaagtctccaatcacatgtttctaatgtaatttgtatttttccaaaaaaaaaaaaaaaactgtttacgtttttttaacatagtgtaataaggtatggaccgtatatacttgtctaacttcatattacctaatgattttcttcaaattctgcactggaaagcaaaatattaatttttatttattttagtaataatacataaaagtttattaaccacctattttaacaaatgacatgcgtttacccaaaaagaaacatgtttttaatttaagttgttaacaattttcatatatgattacttttcaaaagtgtcctttttgaaaaataataatcattttattaaaaatagggttaaataatttattcataatgtgtggtatatatattttaactagatttaacatttttaaaagaaattatagttttacttacaactaatttcaaaaatatttggtttttagagttcataaataagtagatgaaaatatcatcaataataaacaatttcattttatgattttataatctatggtttcttaaaaagcaaccttgatgaattaaacaaaaatacaaaaggaggaaatgttttaggcataaaactgacataacggttgatcctgatacatccatgatatttgcatctgaagcacggtggacggaacatgagtatgtaagtacactaaatatttttattcaccaacctatgtttaaatttttttattataaaaaaatctaattaattttaaaattatactgatgcaaattaacaaaattaaatttatattttgatcaatttttgtattagtggtttataaatatctgttattgtttatttattaacacaaaaatttaattaactattaatatatatatatatatatatatatataatctgtaatccgccacaagaagtttttttaccaatcaaaccttattctgtaccgcttattttgtactaaccgcacttgtcccacaaatatgtattctccctgcatatacctcagttgaaccgtacatcattgtaataacgctttccccgcacaataaaaaccgcgattaccattcagacctttaatgaaaatatttaaagttgtcacattaccaaattatgcacatgcaattagctagaagattaaaagataattctattaacatattttaatcattaacagtaaaattgataaaaattccggaatagagcggaatgatgctgaaataccgtgacacaggatatacacaccaagaagatcaagggttttgctggatattcacaccaacaagatgatctaatcttaaagagttttagaacagaagatagatgagttctcaaagagaatacaaaagggtttataaagagaaaagagaagagaagagaccaaaacatgatcaaaacacaagcccttctcgaaactaacagaaaattaattataagtttgaattagaaaatccgttttaaatacaattgactgccatttaaaataagatggcatagcaaaaaaaaatctccaacaatttcgataattttaccttgtgttctgtttttttttactttttgacagaggagtttcatcatacattcttcttcatctacaatagaaaaagagattattgttaattaacttgatttgatgtttgttttgtgtctcgagaagagttaatggaacaatgagtcaaaaaaggcagaagagagagagatggctatgcgaaatgaaagaggcctagcgaagaaacaaagccctaataaaagcagagaaatgaagcgaaaatgcgatcacatccatgattcatttatttttaaatttatttatgttattaaaaataaattataattaaaaacatatacaaaatatttttagttattgtacctaaacccgcaccagtcccgcttaagtttttcaggtaacagaataaatttaggtgtgtttggttactggttaaatagaataatgaatttctattatgtttggcaattgaaataatgtaattcagaagaaaaaaaggaaaatttgacaacattgtgagtttgtttgttcagaaaaaacctttttctactatagatgattactttctgagctaaaagaaatgcttatttttagtttgacatctaacttctcacttgtcaaattactcttttcattactcataaaaatgcattaaactttttttattggttaccgtgaattaaaaatatataatcacaaggatatgtagttgaaaagacttcgttggcccttttcgaatgattttaaaaccatctcatacgtgtgctaaaagttttgtctaccaactgtttgtcgaaatgcttccgaaacgttttttgtttgttgataaactaataataattctgattttctggtattttttatttgttgtgccgactattttgcagacacgagagattaaaggtatcccaaaaatttctgggaatatagttcttattcaccaatcatttgtagcaaacaagatagaaaaaacatgcctaattctccaaagtttgttttcataagtaattttgaataattttcatttctctttatttacttccattattttgatatatagttcatatccatatctcttatgattaattttttaatcataacatgagaaacgataggaatgaaacctatttgtaggcgtttacgatatttcttatgatacattttttttgtaaattagaatttagaagtagtcactttcgttttcattactggttcaattagaatgagatatgataaaactaataatttttttcaattgtctgctctacaatctacacaggattccaaggaaaaaaatactttaggacttcacatcaccacatcagatattgtcaaagacaattttgttttgtgaaatcgaatactctgaatccggctttgatatcgaggaaaaaacgcttgacaaagcattgaaagaaaaaaaaaatattagttaaaggaaccttatacattttatgaagtttttttttttgtaagcacccgaaataaaattgatgaagtttgagtatatcactatgccttatggtttttgccgaccaaaatatgtcgaaattatgaatacatatattttatttatttatttatattctattaaaattattttgggtgtaataataaaattaaacttctatcaattttaaagggaggattattaatttaaataacattaaatcatatatgatatataatcaaataatattttagtaatcttaaaattaaattaaaatttaaaaactgatatttagataatcataaagtattaacccacaacaataagtgattacaatttaaagaactactattagtttcttaaaatattttaaaagcacatgtgttctaaaaaggttacaggtagataagcagtctgctcctaaagaactataaacaataatcacttttaatttgtttaaaaccagcttgtttcacgccctaaattaactaaaatatatctaccattattccagacaaaacgacgtcggttggtgtgtttcacgccggcttggtgctctaggcatctatctgattctcactatcactactgacacaaatccttttccttttgttcctctttctctaaaccaatctttaaaacaacttattcgtcttcaagatttctccaacaagtcctaccatgtccggcgaaggagacacgaccctcaaagctatctgttacaagcctggctctctccagttactcgatcaggttctctctttcacttctataaagttttcaaatttatactttttttcctcaaatctgtttactcgtctgaattggaacagaggaagcttcctttagagactatttacttagagattcgtgatgcttcagatggatggtaaagtctttacctttatgattagagattgttttgggaaaattgtggtttaaaaagtttgatacttttggtaggagtgctattcaggaaatggttgtacgtggtgctcctgctatagctattgctgctgctctttctttggctgttgaagttttcaactttcatggttttgatggatcagcttcagatgctgttgcttttcttgagaacaagttggattatttagtgtcaaggttagattttggatttgttagttaagttttgcatctttggtgcttactctaatgtcttttgctttttatgtttgtttcttcagccgtccaacagcagttaatcttgcagatgctgctttgaaacttaaacatgttatagcaaaggccttggctactgccaccgaagccaaatccattttcaaggtatcaagaagtttcgtaattcatctgtgtgtgtgccttttgcttttgtaagtttagctcattctctgtgcttgttgttcttcaggcatatattgaagctagtgaggatatgcttgaagatgatgttgtttcaaacaaagctataggaaactttggtttaagcttgttgaggcaacaagccaagaatcctgataagctttctgttttgacccattgcaacactggcaggtattgatttagctagattttctgaattgcatagataccgtctgcataagttactcaagttgagtaatagcatgttaccacatatgtgtatgcagcttcaaccaatagagttgtgtaatggtttttggtgttatgtttatgtggtagattcctagtaaggcattaactacgagttctattgactttgtagccttgctaccgccggatatggtactgccctcggtgtcatccgtgcactccatactcaaggaatcttagaaagagcatactgcacagaaactcgtccatttaatcaagtaaaactcctaaattaatactttttctttctcaatatcgtaagaagaagaatccgtagaataccttaagttgttagggacgataattacctctatattgacatatgtgttcttatcaaaacggtggtaaaagcttcaaaaccatgaaggaacgtaggacagatacttcttgtggcagctccctgaatccattgctttatagagttttcatatcttgttgaactgttgttgaaagtcttttgaatttatgactaaatggcaattgacagggatcgaggcttacagcgtttgagttggtgcatgagaaaatccctgcaactctcattgcagactcagctgcagctgcactgatgaaagatggtcgtgttgatggtgtcatcgttggagctgatcgtgtggcttcaaatggtacactcaaacaccttagataaatccgttttctctcacaaatctgattccttatgactgaatcacttcttaaccaattcattgatatactccaggcgatactgctaacaagattgggacttacagtctcgccttgtgcgcaaaacatcacgggatcccattttatgttgctgcacctcttacctcagttgatctgtcactttcatccgggaaagaaatcgtgatagaggaaagatctccaaaggagttgatgcacacacacggaggacttggtgaacgcattgcagcaccagggatctcagtttggaacccagcttttgatatgactccagcagagctgattgcaggaatcataaccgagaaagttcgtttttccagccttgcttgttctggaagatatttatgctcatttatttgaatctctcaacgtgtttgtatatgcagggggtcataacaaagaatggcaatgatacatttgacataagcagctttgccaagaagataacaggaaactcatctcgttgaagttagagtcagcattgcgacttgcggatgttcccctctctctatatacttgcaacaaagcaaattactttgtaatgtttgagctactaagtacactgtggtaaaaattgtcaaaaataagaaataatcgatacgttttagccaattgtaggtagccaaaatgctggtcttgggtttaatgctaatgaagattgggaaacaacttgttttagtgtaaaacaacttgtccatgggcttgcccggtccatcttgacttggttcttatttctctatttttttaagtttaagaaaagaataccgtttctcctacccgtcaatattgaaataatttcagaggttttccttgttctgtgtcaacaaacaattcgaaatgcctcgactttatcaattttttgataattctgaactttagaccaaatgcatatggacgagctatattctggaccaaaaaacaaatggtctaattgggcatatgaccagttttgtccacggataatatgggcttgaccatatggacaacgggctgcccatgggcatgaattgagtcaatagacatgtcttcatttaattgtatttttataattttaattacaattacaactaaataatttttaaataatatattttacatttataagtttttacttttctgaaaattttaaattttaatgaattatttcttattaaattatttacgattttaaaggaaagatagtattccacaattttctggaatacgcaatttttaaattttacggttttgacgggaaaaatacaattctccgattttacgattttgacggaaaaacgtaattctgcaaattttccaccaaaatcgtgattttattatattggcgagaacacaattttacggttttgacgggaaaacgcaattctctgattttacggttttggcgggaaaacacaattttccagccaaaatcgtgattttattatattggcgaaaaacacaattttacagttttagtgagaaaacacaattctccgattttacggttttagcggttaaatcgttatttttttgtatcggtgaaaaaaataattttacgattttaccgttttggcgaaaaaagcaattccataattttttcgtcaaaatcgtgattttattgtattggtaagaaaaacacaattttaccattttgtcgaaaaaagacaagtcttcgatttctacaatttttacggaaaaatgcaatttctcaatttttctttaaatttatgatttttgatttatcaataataacaataataaaataggctaaccatgggcttgccatatggacatggtctttattgggcatggacatttttcggaccaaaccgtccaacttggcccataaaaaaactgtccgtacggacacgcccaatggtctttggacggaccatttgacacatctagaaacaaccgtcagcagtagccattcgttaagagtttcagaattccgatatatacattttgatacaacctacacaaaaacaaagacaaagagagaaaatccaactatgaggaggattatcttgttgatagtgccatcaaaaacaagagttagttattcacctgaaggtttggctaaacaaagtatattatctcttttcatatacctgtcaattacatcttgacgctgcattgtcaacaatagagacctcctatgtcctttgtattcactcttggctttcttaagtactctagtagattcatctacaaatgtaaacatggttgtcttcgccgcgaggtcgtttgcatgttcttcttttacttgtttcgtttcagttcgttcttgatcctgcaagatcgggcgtcttctcattgcggcgttagttaattaaagtattttgtgcaaaaaaaatttccgtccaattttgcaactttatactctatgtccaaaaaaaacaaaataattatatgaaatttaaaataatacgtaatatagtcaatttttacaattttacatattgtaaacgtaaaaacatttgtttttgaaattttttaaaaaataaatagttaaactactcatatcaagaattttgatttgatatattatttatcaaaatttaaaagtttaataatatcaaaaaaaattatattgtgtatttttttaattttatataattattctgcattcttttaacgtgaaatgtaaagttgcagccccagggagtattttagagttttttcgaagataattgtaatcttaacttattatttcaagggtattttgggagattgactatttttttttgggttctgtcttgaagacaaagaaagctttcttctataatacatctttctctacagatcacacagaagcaaaaattccatctccgatttcggaagagagttgttctcttctctgagaagaagaagatgagcagaggaagcggcgctggttacgatcgtcacatcactattttctcaccggaaggtcgtctcttccaagtcggtcagtaatcaatttctctatcttttttgtttttttaatttataacttcggagattgatattactggttacggattttgtagagtatgctttcaaagccgtgaaagcagctggaatcacatcgatcggtgtccgagggaaagattcagtatgcgtcgttacgcagaagaaagttccggtgagtcctcttttgactccttagggtttttgttcaagtgagggttttgaattagggatctgatgaatgatttgtgggcaggacaagcttttggatcagtctagtgtatctcaccttttccctgttaccaagtaccttggattgttagccactggcatgacaggtttgtatttctcatcacaatgcttgttcattatggtcatgttttgatctttctggggttgcagctgattcaaggtcattggtacaacaagctaggaatgaggctgctgagtttaggttccaatatggttatgagatgcctgcagatattcttgctaaatggtaattaattacagactctatgtgtctctctacacttatgaaagttactaatactgaactattgtgctgtgacaggattgcagataagtctcaggtttacacacaacatgcttacatgagaccccttggagtaggcaagtttccctaatccctatttatacattttacttgtgtggtggttttatcctgattcttgttttctttgtctttgtgaagttgccatggttctaggtattgatgaagagagaggacctctactttacaagtgtgacccagctggacatttttacggtcacaaggtaataccacctacttgttatgattagataagcctctgcctcttacatgcatattcgtatagactactgcctttgctaacatggaagaaagaaacattatattgcacttgcctaaccagatactgtactgagaaacttatctgcttttaagagttactggttgaccatggaggtgaaaccaaaagttctacacactgtaaacctgtgaaatatgatgtagtcacatacgtggtacatatgttccataggatcagaggcttctatataaagtttctccacttataagttagcaaacatatgatgcaggcaactagtgctggtatgaaagaacaagaagcagtcaatttcttggagaagaaaatgaaagaaaaccctgccttcacatatgatgaaacagtacaggtaattatggacaatccttctttattttagatcggaagcaggttgatcatttgcaatgttcatttgcttgcactttaaaagctttattgttttatattaggtttagaaactgtaggaacgcacaaaacaccaaaattctgtgacagacctagaccattatatctgactttgagttatcaacttttgtagactgctatatccgctctccaatctgttcttcaagaagacttcaaagcaactgaaattgaggtgtcaattctccactatctgtactcctttttgtataaatgttggcaagagtagtattttgtatatatgttggccagagtcgaatcgtgttagccagagttgtatcgtggttaggaataaagaaggagaaaccaatggaaatgtagttttgttaaagctttgtgaaaaggcatgtaaatatttatgctggctactgttgtgttggcaggtgggagttgtgagagctgatgaccctctcttccgttccctgagaacagaggagatcgacgagcacttgacggccattagtgaacgtgactgatcactttcactggaacattcagtcgggactttgcatctctttcttttgctttaaatctatctaagatgattcacgtttcagagaaacgtgtttccattagtcatgagtcgtgtagttttcatttgaatcatctgcttcctcctaataggagttacatgtaagggtgtcaaattaaggtcgaatgagatggtttaaggttttgaattttaaaaggcaaaacaaagaaagttatttacaaaaattgggaaatctgcaaaacctggacacttggtctttaacataatctcctaaaggaactctgcattttgatgtccgagtccaactcaatgaacagagcttgactgaaacgttttttggaggtgaaattcctttattcgtaggcttgttaaagagtctacgctatagcttaccctcgactctctgccacccttgattgcgatactgatatagttgagcataaaactcaaaaggtcgtgtgaagaagaattttggtaagatgtcctttgttctatcgcctttgatgtatatgtttttgagttgtgcgatgcatgctgcattgtctttgtacataattgttggagcttttttccttgcatagataccacaatctttttgtatatggtaactatggatcttagccatacacgctaaaaatcttgcggctagtttcatgaattgctaaaatctctgaatgattagaagatgtggctgcaacagttttcttcatagaacgccaataaatagcaatacatgtgaagacatattctgtttacgatctaccattatggagatcagataaatatcctgcatctgcaaaaccttatggagatcagataagtatcctgcatctgcaaaaccaattaaatcttctaaattggttaggaaaaagcagactcatgtctttcttacattggagataacgaagtatatgtttaattccattccaatgtcttcgagttggacatgaacttgcacttaagtatgatatttcaggactaagaactccttcattgttttcccgaggacataatggatctttatccacatcaagtgaccttacaaccattgggctactcaaggggactgctccatccatgtagaatcttttgagaacattttctgtatatgtctcttgatgcaccagaattacattatttaggtgttcaatttgtagtcccaaacaaaattttgtttttccaaaatctctcttctcaaattctttctttaaatattctactgtgaaggagatctctgcagaagttcccataatatttaaatcatcaacataaactacaattataacaaatcatttcccaaatctgtttataaagatgcatggactaacatagtctttttttgtatattcttttagcaagtcactaaggcgattataccacatacaccatgattgttttaatttataaagggatcgatttaattttatgcagtattgttctcgagaatttgattgtactgcttctgacattttaaatcattctgggattttcatataaatgtcatttttcagtggaccgtataaataggttgtgactacatccatcaaacataaatcaagtccttcttttactgctagactaataaggaaccaaaatgtagttgcatccaccacaagagagtatgtctcttcatagtcaattccgggtctttgtgggaatccttgtgcgactttatgccttacaatttcaccgttttcattcttctttcgtacaaagacccatttatgtcccactggttttacactttcgggtgtacagactactggtccaaacacttctctctttgcaagaaattttaattctgcatctattgcttcattccattctggcaaatcacttctttgtgtacactcttcaatagatgttggttcatgatcctcatccataacatcaactgctatgttgcaagcaaaatatcatcgacgtcgatttgctttcagttctattttcttctagacatgacataaccagttgagatctcttaattgtcaggtaactgaatttctttctgtgtcatgtctaaagtctcttcgggagattcctcatttgtaattattttttctattttacctatgccaatttctgtcccttttcttttttaaggatttttatttttgagccaataggtttaccacgctttaaacgtgtttttgtccttaggagatatttattcttattggatcatttgcaaccggtatatgtgatttgatcacacttttgggtcagtaaatgcatagggcaactgatttgctaagctctgtaaatgaattaacttttggacttctaattcacactctttagtccgaggatcaagataagacattgataattcattccaaagtatatctttttcttactgtttatttatccctctaatgttggaaaaacagactcattacaatgacagtatgcgaatcgagcttttgaataaatcccatgtggatggctcgagatacttttattgatgggaaatcataaccaacatatactcccaaccttctttgaggtcccattgttttcccacttcttatgagagtttgagttcttaaaatgaactccactgcctagtcctctagtgtatacacggccacgaccacggttgtaaccacttttttgaccatagcatgtcacattcgtttcagagaacaaagcaaaacctgatgggcatagtccatggtttttcaaaagtaactcattgtttttctcagctacaagtagacaagaaataagttgggaatacttcacgaatcccttttcaccgtactgtgtctgcaagacaatgttattagcattaaaaagtagagaatgtctactccaacttatctgcatccatcattttctctccacataattccaatttaaagttattttgaataaggctgagttgtactaacttacatatttaaagtcttggagtctcagatgagtccaatcatatcggaccttagataatatcatagtcttctcatgatcataactgtgctttagattgttccaaatgatctgcggatctttcacactgaaatactcattcttgagatcctcatggagatggtatcgcagaaaaatcatagcttctaatttttctttactttgagtttgattcccatctttgatggtatcaaggagatcttttgaatctagataaatttcagcattcagtaccaatgccaaatagttatctcctgtgatatcaagagttccaaattaaagattcataagttttgacatggtttactaaaatattaaaaaaattgattaaatatgactagatttcaaaaataaaaaaatatgtgttaattttcaaaatacattaacaaataaaatattacaattatcttttttttcgtcttagatttatttttattgcaaattatgagaactgttacaaagacgattttactacagacaattccttctgaacgatattataattatcttataataataaagtattactttgcaaggaaagtttcatagaaaattaaaaaacgtagaattgggttgactaacgctttttgttaaaaaaaagtaataggacaatcaaatattaaatatatgaaaatcaacaatcaagtattaaatatatggaaatcagaatattagatatctatctacatatgaaaagtcaatatcaaaagtaataatatatgtacgacgatcatggttgtgaaatatgaattatcaaaaataaagtattaactaaataatattgaatcaatcgtaaaagaattttagataataaaatattaactgaactatattgaatatgcaactatccaaaacgaagaagatagaaaaatactaggaattaatgctaagaactagttctttggctcttatataagagctggttcttagaatttaaaccaattattcatttaatttttgtcaaagttaatgctaagaatttcttaaaaacctaccaataatgatgctctaatgcatgcttgcatcattcaccaccgggcatttaatagttgcaatattaactagataaaatatcaaattaaataatatattttatattattataatagatttcacataaattaacaatcaacaaacatgattctttttttttgacgattttctttatagaatcattgaatcatgctataataattagataaataaatggtaagcatgattatcttctttactgaatcattgaaaacatgcttttaccaatctatatcataattatcgatcggctcatattgtttgtttcaataatagaaaaataaatactatgaaccatgagtcgataaataaacatagttctataaaaaaaaatgagaatatctaccttttagctgataacttgttgtaaatagagatagagatcgaagaaacgtgtgtattattctaatgaatagagggtattttatatcaatgtggaggggaagggttttacttgggtgacaaagtaaaaccctatgtacaagtaattttagagacttctataaaatgaatcttataatgggcatccatctattatttagaacaactaggtgatcacccgcgctacgccgcgggttttttggattttttgtattgtttaacttaaatatataaataatttatttatctaatcattcactcatgcaataagcaattacttttagtatttaaaatattttttctaacaaattctcaccaatgcatcatgcacataattcataaacaacgtttgtcttaaaccattttaatagatggtagtgttggattctagaaacttaagaatttgatagtggagctccttacgtattcctcaccctcaataatttattatataaatatcaatttaggagaatataaatatcaatttaagagaataacttactcaaatcattaagtaatccacgactattatacactcatactttgtgtttggattacaaaaaaaaaatcttcgagtatgagaaaactattataatggttttattgaaaaatcatgtaatattaaaataaatttagtaatagtacaactaaatatgtaaaataaaataatatctaaaattaaataataaatatatcattaacctataaattaaaagttgaagagattacattaattatttaatagacacatggcaaatgctaaagtgatgatgtgtcaatcatatggagagagtttaccaactttcatatatataattagcaattaactgttttcttttatagtacaaaccttaaatcaaaaagatgttcaaaatcagtacaaacctaaaatcaaaatattatggttataccatcatacttgaaaaaattattggcatgttatatccaactattccttaactaattgactaatattatatttaatttattcctttaagctactttaatgatcaccatctaactctaataagatcggaaagctaaactaggcatgatgcttaattgtcatatgacaaggctgctttcttagactatgtcacattcatcgtttaattttgattagaaatttataatgttttctacaaagacttgcattactttttaattacaaataacaattttaccatatttatatcataatttcactacaaagacttccattatttttcaagtattcataatctatttatctcataatttcacatatgaaaggtttgactagattttgttttccttttggctaaagattaaatttgttagattatactaataaatcgaaccatttacaaaaaaaaaatgaaaatattaaaatatctttcaagtcacttgaaagatatttttgtaaccgtattctattttaataagaacaaagcgcataagtaacaaaattgtctatgtgtctcattttttcttgtttattataactacttgtcccgctgtaataaagtataaaaaatatatatttttaacacacattgcatccacattttgtttttgttttatgagcaattgcatagcacctttataactaaattatttaaataaacacattaaattgtatttaattattaaaaataaagtcaatctataaccaacttataaatcaaatgaaactatattttcgtaaataattataaaagttgtctcgtctctcataaaaaaaacaccgaatttcttgaaagttcccctttatgtgttgaaaaccgtgtggctcacccaattccagctcaatatccttagccgattgcttcaagagatccacattccttttcttcgtgtgtagtagcacttacacatataatagccgattgcaaattttctttagatgtcccagctattttaacaatatatggtttaattagggacttaatcgcttcctagatgatcctaaaggcattatattccgtttcattgaattattataattgctcgattgtgaggcatcaaaaataaataaataattctaggtcaataccatctaggattgtgagacttgttaaacctacaattactaactaatgtatattttgttgatgatcgatgcatatgtatatgcatttagaagttatagagcattgattagacgacataaacaacaatgcaaaaagaataaaatggtttaggtaaacaacagttttacttcttgcgttagtgatattttcggatggtatactaccaaaatatatatatgtgaatatgactatctgagtagaatattgactttagttacacgaaacatcaaatccatctataaaccaaagtatcttgatcagtcaatagaggtggtacatgttacaaatcagggtgtttgagggagaggagtgttacggatgaaactggtaaatagattaagagcatgtacaggttggtccaaaggaacagaatgacctgatcctttcacagttgcatacgttaagttccgttcgtaatcctctgtgaaccctcccagttgtcctccggtaaaccacggacgccattcgtttacaaccgttagattcatcgtcttcagcacggccattgtagctgtaaacggaatagccgcatccacgtccccactatacaccaatactcggacaccctcacccatcaggtcgtgaaggataggaaccattgaggcatctttatcagcgtcgatccatacggaattcaagtagtgattgcaagccttccactcgtacggtaattttgtggtgttggcatgcatcgcttcttgaacattttcgctgttaagataagccttcacgtagttggaacggcacggatcaacctccattattgtggtgcatttcttgggttcgctgcttaacgtggagtttaggcacacgggagcgtatatgttgtaaacgtccaagtgtttgttatgttcaatactaaatttaggcattatctttgggcattcgtccatatcatagttggcaaaatcgcagactttactgtactcttcaaaatctttttgggaaaccaaaccatgacttaaaataaatttattctcattatcagcctcgataagtaaatcgagacctggattaccgatcgaaatgcctcgtagattgatgaaggtttggttgttacggtgaaggatgatctgggccagttggggaatatagtggccagcgtaactctgaccggagatgtaaacgtctcgtcctttatattccggaaacctttcaagccaattcaccaagaacatgtagttatcctctgctgttagcttatccgcttgttccccaaatatctcccaatcaaaaggagtactcgagtacgagaatcctacacttattggcccttcgaagaacaacatgttcgcctctgcaaatccacacgcaatcgcatttctcattgatctcattacaacttataaataacgtagactaaaatttctaattatcatatttttttaaaaggtatacgtaccgttgttccatgaataaggattgcggtaaagcgttttgccatcgctatgtacgcgaaatggaccaagctcttcaaatgccccaaatcctacagatgagcaccccggtcctgtacatttttataaaaagtttgttcttgttagaagagtctaattgtattttaaaaaatctataagtaataccaataaagagagtttgtataggggatatatattttctagaggtacctccgttgaaccagagcacaagaggagtagatttactaggtttgatggcttccacaaaataatagtacaaaaaccgagtggctggttcgtttacggccacataaccaccgtactgtctgaaactaatgccggaaggttgtccggggagcttctcgattagatctttctccttaagcgaaagcacattttcgcgactaacagaattgaagtggcttgtgtcacctgacaaaccagctcctcccttgtggcttggaaaatgtgtttggctactacaatggatttgtgatgctagagacaacgataggaaaatacaagcggtcacggaccaatcttgttgttttcccattctattatttctgagtacgagagagatgaaaggtttaagaaatgaatggcagcattttatagatatatttttggtgttgacaactatttttactatatagtgtttttaaacgatgtgttctttttttatatttagcaaaacaatataccttttacagtaactcttgagattaaatttaaaaaccctatattttgggttttggggtttttccaaaagtaggaaaacaaacaaacaaaatcaagacacggccattcacgtctggcaacaagaaacaacttgcaatgtaaattctgatgtctctgcatccttcttcgcaaaggctgggttgtgtcttgttaatttagataaagacaaattatctttgtggttaaatataaggaggattgacagaaatgacactaaaaaactttaatattataaaaattgcacttcttttgaaacttccaaatatagcagacaaagtttttaatcctctagaaattaactaaataataaagttttttggtactatttgtgtcaattcccaaaataaaaatgaaagcaaacactaatctaatattaaattaaatcaatttttttttaaatagtgaaaatatatatcataaattggaaatagagaatccaaatataatactaaacactaattttaaaatgaaaaatctctctttaaatggtgaaaatatatatcctaaattggaaatagagaacccaaatataataccataaactaatattaaattgaattaaaatttcttttaaatggttgaaatatatacccttaattaaatttatttctaatttattttggttgaatagattttatataaaattatggtattattgaaaaaataaattagtgataattctttagaacaaaaactttatagtaaatcaagtagtgctatttttagaacttgattgagtgtgtgttattattatccaaaaatattgttttagtgttatttttaggaatttttcaaaatataatcaatctcggatataattttattgttaatgaaggatatttttgttttataacttcttatgagaaatgaagagggaaacacgtgtgtgaaatttggaaacaaaaaaaatcactttaaaattaaatgttgtaaaatttgaggaatcataacatgaatatcatattaattactctttagtttattcttccaaattggtcgattaatgctcttgtccgtgtaatgtacatttttctccaatgtagctgaaacatccgcaaactttacaaagtcgtataaatgattgtacttagtgtttaccttagtctcaccaatatctaagtcaatcaagaagtaagtctaattaagtacttttctttggtggttaattagagtcgttttctaagtttggaatagatttagaattttatctaaattggtttctgaacatgcatcttgcttcactctttcggtatattgatcatttaaatcatgttttaggactctaataaactcatgaatgtactaattattgtctattataaggtttatgaaatcacttggaagttggtactgtagtttgatgattttagacttttagtatctgttagcttgacagttataattagtgagataactgttaaaaagcggctgcaaaattagggttacaaaggttgaagacgattgcaaaattacaattataccctccattaaattttttgtgtgtacatatttataatttacaactaggtcagtattcgtgctacgcacggtatctttggttaaatcaatcatcaaatattaagttctgtgtattccacataaactctactttattttcattatatgtaaacatatagttgtatatcatgtatcattggaataaaataaatatatttagtctcgtcaaacaatattttggtaagtatatatagtttcctcgggttgtagcatgcaaacaatgtctaagttgatatgtacgtttgggaacgtaattttatattttgtatatgtaagtttacacatagtagctttgtacattttcgtgtatgtaagtgttatagaagtttaacagtatctcataatcagaaaatttctaattttatatatgtttatatttacagaatgtgaaactaacatttgttgataaaataattatgttatatgagacataagccaaagcaataataaatatatttttctaaattttgcaattctgatagagacagacgaataaataaatattagaattagatatataaagcaatattaagatgttttaaaaaaaaagcaataatctttgatattaaattttgtcataccttctaagatttattttaggatgaagcatattaaattttgtcaataatagcgatgcgatattgtaagatatcaagatttagaacgtattctaaattagaaatatgtaaacttgttcatacataaataaaaatggaaacttgttcatacagaaattaaaataataatagaccgagttcaatagggtacatgtaagaacattttttaagtagatgttcaaccgccattccttgcaccttcatcacggagcctacaaaacaaacaaatgtggtatgcaattataaataatagtatagatattccgtttatataattactaataacgaaatgtaagaatatttgatgatagatcaaaacttacatctcatggatctcgttagactcgggaatatcaggatccggaaagacggttgatatcgggcctgcggtgcaaacacgtacgttctttggaccatcaaaataacggtcaatcttccaccaaccaagaacaacgacaataactccaccaccatatcgacgataattatgagcttccttcttagtagctagacatttcaaaacacggtttctaaacataaaatcaaaaatattattagaatagtataatttaggtaattcgaattaaactatcaaagaaggaaacttactcattgtcacttattttgaatgttagcgtcaaatcatcgacgttgttttgcttaggtcttgtgttaatcaattctccaacatcatagatcgctcccaccaagtctccaaaaaattacataaattaattaaaataaatcagagtcaaatatatacaattgatattgaaaatgacaaaactaatgaaccctaagatgcatgatataaaataaggaacaaaacaaattcataaaaatctcaccgactaaaacagatttatcgatttcatcatcaataatcgaagagaaggatgctagacgatagtgaggaatagcgggtaccggacttgttaatctgacgacagtgtcaacagaaaatccaattttgaagctatgagttgttgccctgacagaacccgagttctcaacaactccaaaatttgttatcgttacccattctccttcattaataaaatctttatagtgatccgacatcttatacccaacagtagcttcaatagtcataccctacggatcaaacatactaatcaaagttctaaaacatgcaaacatagaattatcattacaaaacagtcaatacttacatgttcgtcggcgagaatcaaacccataacctttgaagatggaaccagcgaaactaagaatgtcctcacaactctcccacgaatacaccatcctctaatagacgatttcaacagtgaaagaggatgaaacgattccatcttttggcataaatattttagttatttttttgtattcgttttatgatatatatatatataagagacaaatacaccgtagaggcatgttttagacgcaacttttttaaaaagtaataacagtcatgatgtttcaagtcacttcgtaatcttgaagattctgtaatatattttgaataaatcaattattaataaaattaaaaatttggcgagtcttatattttaggaaataatataaatattgtatccttattattaattggagttcttatataaataccaattgtcttaactgcgtggataaattactaataattacaggatcctataatgtttgagacatataataacaaaatttccataaaagttaataataatggagagaaataagtaacaaaattttaaaatatttttaataatggaagtgattaaaaattaggaaacaatatatatgcaaaaatattgttaacaacagaatctataatttaattctattatggcacttatatataagagttgaaataataaatgttttcaacttagaagattttctaacgatgttgattttaacgacatatttctttggacaaatcttctaataaactctaaggtttggttttttatttttctttgtttaatagtgtagatatctaactcatattttagattacattgtaatcaaaatttgcaatccaaatacattttattaaaatcaataaaatatcaacattatttaaatcaaaataacctaataattggtcaatctaaaagcagttataatttgatctaagtttacggttatatagttatttagtaagcattaaataaaaggagttataataaagttaaagtttaacagaaataatcataagaaagtcaataaaaaaataaacaaagtctttaaaagtacaactttaaaacatatgtagataagtttttaaacaaaacgatagataggggtctgatgttgcattttcagtcctcgtccacaacttcatctagctcaggtgtttgcattcgttgaaggaattgagttctgaaacagtaggaaaatagaaaaattaaaaaaaacgaagaccaaaattttagaaaatacaataaacagttaagggataatgtaaatataaatgttcttacctgacgcgatccatgttaatctctgggtaactttgattgaatgtaatttttgaagcaccattatgtgagattagacattgacgacctaaaatattaacatttttattatatgaagtagctatataaattatagataacataaaatgagtcttaaatataccttcatgatcatcaacattccaaaatcgtagcacacagattgtaggattcataccaaagttccagtgataaccaagttctagaccaagttccctccataattgcacaaacaactcacaagtatatccgcttgcaacacatatgagagatttacccctaataacaatatcaaattattccaccaaaacatctaagttctatgaattaaaccaaccataaagataacaatatttactatgtttgtgcattcaaatatataaccaaatagatgacaaattatatagtggaaaatactaaccaagaatttttaatctcaaattcgagaaattgagaaagtatagtattttctgaagcttgagggacaaagtccggtcttgttatattcccaactctcacgacaataccataagcatctacaaaaaaaaaaacgttaatatgaaagattaatattttcaaaaaaatagactttatattagtgaaaaatctaaataaaaaagttaccatgaacagttgaagaattaatagtcttgttttcgatcatagagaaggcagcaaatcggaaaaggctacttggttctctattaggcacatgagtcattttggtagtctgaaggaacttgattctcaacttattatcagttaagggaggttttctaccgccgactgatttgatcagaagtatgttttccaagaaaaaccaacctccttcattgagaactctagggacgtcatatccagcgtagaattaagcacaaatggcatcaatcattgtgccctaaaaaaaaaaaatattgacttatgaattattattaatagattagatccaaagaatactattaaattattaatagattagatcaaaaaacaaattaccatctcgtcgcacaagatcatttggtaacacttcccaccctcatgaggaagtgttacccaccaacatagtagcttcacaaaaaccttccaatcttttttttttgagaaagttgagatagatatgagatacctttaaaataaccacctctatcatctctcaacatcttttttttttttgaaactaatagggtagaagaaaaatgtcgaagataagtaatggatgaaaataagaggggaggttaccttttttcaggttatgtgtcctttgacagtttaggaatattacttgtattttttttttttgcccaaaagaatattacttgtatattaaatagaaaaagttaaatggcatgcaaatcttgtcaatcgaatttggaatctcgatggtaaattatagtgctttttatgattacttgcgaattttaataaattttgtaagaaacaaaatgtgacataagttgtcatatctcttggatgagttgtctaatcttgttatcaatcttggaaaagatggaaagaaaagatgtgaacaatagatttaattgagaaagcaagtctcataaatagattgaagagaatatagatgttaatatttgtatctactcaataaaatttactttattattccagaaaatatgtatgagagcaaaatatatttagaataaactgatatatatatatatatatatatatatatatattacattccttagaaattaaattctaactgttatatatgtatcgattatttttaagtcacaaaggtaatgatgtgactttcatctatattcaaaaagaaactttaaaaggagtacctaggttttcaaaatcaatgttattttaatatgagagacatgatactgaaagataatgcttttgtagggttataaatataaagagtccaaatatttaagattactttttgtataagacaatgacatttagttgaaaagaaatgaacttaataataaatgatcctgatgtttccaagaatgatttatctcaaagtttttaatgttttattcttgatacccaacaattttttaatttccttttaaaaagaatcataaataatgatatgtcaaataaaataaattaaaaggatagtatttttttaaagaaaaaaaaaattctacaactatatttatatgtaatcgttgcaaatttatatatgagtttgtttgtagatttttatgttatacttgtaaactttgttaggagtttaacaaaacataagatatatgaaaataaaaagggaatacattacttaaataggttcaaagcataagcatattttttataataaaaaataacttacaatgacaaagtttgcaggaaattaaaataagttcgaaacataatttaaataagaataggagatgggaggtcaaactcctaattctcttcaatcacttccatccttgggttctttggaatttcatcataatcttcgactgcggctgtaaaagagaaaaaacaaaaatcggtattgattaattgatgttttggttaacgaatacaataaaaaagtgataaaattcttacatgtagctttgaatatctatctcagggaaattggttggattgaggtaaattcttgaacatccaaattcactcttcaaaacattctcacctgttccattagtttcatttaaaattatataatacaaataacaatcataagtaaatagaattacaatagaaacaaaaataactaaccctcaatctcagcaattctccaaaatctcacaatggcaacaatgggctgatagttataagcggctgaactgatacattttgagaaatttgtaacaaaaagttcacagcatcttccaacagcatagcatttcattttctttcccctaaccaatatgataaaatattagactaagcaatgcattattaagctaatttttcagacaggtgacacattactaaacatacttaaaaacactacaacttacatattgtccaaaagttcgaatgagacatatcttgattcatagtcggtttcaacttggcgacaaacaaataaaaatttcttaatagccgagatatttgtcaccacacccattgcatctaagtatagaataatatattaataccatatttcaaaaataataacataaattactatcataaattaattcttaaaatgagaagaacatagattgactaaaaacttacccgtgacataatcccaatcctcaagacatggatacttaaggtcaatgggaaaaatgaagtcaaagaagtctcttttcacaagttccgggagagggtgaacacttgtttcccaaatgaatttgatgtgaaaacgaaaggacgaatacctaacccttgattgaggaacaacgacccgaaagtcagagatgtgaatccatgtgccaggcttgagaaacggacagaagggattgtgatagtttccttgaggaattgttgcatcaacacggttattctgaaaaagtccaaacaactcaaagattaaatagtttgtgatgatctgtttcaataataacaaagtaaattgggattaaaagaaaaaaagtgaaaatacaaaccttgtcatcatgaagaatcatggtcgtaatttcaccatgactgtttggaggatgattccaaattgacaggatcttgacgttaatcttccagtttgttgagttatccctcaaatcggtgagtttatgaacagacatcttgtgtatcgaagaaagttttttttgtttagaaagataaagagttaaacctaattgttctagacttgaggtttttgattttatataattgggaaaagatacaatgatgaaaagttgaagtgtaaaaaggaaacgaatcgtctagaaccaataggatttcttatatgttagaacaataatgatgacatttatttcttagcgtgttactaaatattataattaataaaatgagaatctatgaaaaaatagaaataggttgttttgtttgagttatcatgattaatcatatttaataagacggattatttaagtgtacaaaatctttgctatttttgattttgtagaatatttaatacaaaattaaaaaattgtttatagttattagtatgattaacattataaaaaccaaatgatgtgtttcttaataatagtgtagattttttttctgaaaaattgatgttttgagtttttttcttctttcatcaagattgatgttttacaacaacatcattactatttttattgttaaccaataaaagaagagagaaatataactaatactatagttaaactaacaaaataataatatttaatgaaaagttgttattcttactttgtgtcaaaattctacaacataatatttggtgaaactaagagagtaatcaaatctcagctctgtgtattccaaaaatttagatttaacaaaacaaaacgacatataattgaaataactttattaattcccaaaaaacacaaataaaataaagattgtttagatcttaaaaaataaaacaactctgataactttaaacaaataaacaagaaagaagaaaacgatcaaagctggagtagtcattgagcatcattcgccggagcgttcctcagacatggtcatcctagaacacttcttcctacttgtggaagcctgatcatttccatcaacatcatctgaatcttttcgttttcatgatggagtagaggttgacgacaaatcgacatcagaaaggtcaacaccattagtgagcataagggaaccctatatgaaaatacaaaaacattttaagaagacaaccctaaaattttttgagaaataattggaatagtttaatgttatttgtcaaacctgttcgatcgaaattaaggatgatggatcaacgtatgcatcagagtcttcttgaacgatttcatcgacaatgttaccggtgtaaactcgggcaacagtgaatgaatcatatccaccaaatatgttttccctttgaatgcacaatagaaactgaaaagtcttgcctttcaaaccattgatcacatcaggcaaaacagttggatcttcgatctacagaaaatacagattattataacatgaacgtggtcattttaatgaaagagttttttttttaaaaggcattatacctcatcaaatgacccatcaagcaattgaggggcagtagtgccaagaatttcctttgcatgactatcgaataacatgcatctagcttcatcggtttggtccataatatggagatgtaggcaaaacctaaaagttaaataggattattagcttctaaacaccaaattataattaataatacatttaatataaagatttcataaagactaacttggcaacaacagattttgcaaaaccattgcatatttcacaccaaaatcttggcttttgaggttgcttgacatcttcaagtttgatagcttcttctttgacaaccttcttgttgtgagcacgacaacaaaaatagtagcacggccaatctgtatcaattgccgaaacagtgcaaactgttttgcacttacccaccttcaaatgaatgtaaagaggaattaacaaactaatctaagaatataaaaatgtaataaaaatgttagtatgataaataaattaatgaatagtacatcagaagatgtgaggacttccttgattgtttgccttggataatcaccatcgtcatccccagttcttggtgcatagagcctcttgtgaaaagatccagaacttcccaaagttaacccatcagttggtatgctatatatcaagaaaatatagtttgcttaatattatgtataaaaaaatatatttagtgacaaataaatacaattacctttgcttaaaaagatccaactcagccaacgtgggatccacgaagacttgtgaaacatcaaaaaaattggaaacactcctagtatctgttttaaaaatataagatcgtgtttttaaaatagtatagatatgtagtaacacataacaatataattaccgttgtagagattgatcttcgcaaatcggattaagcaaacaacaataccatcggttgactcctggcaagctttgtcaacaatctcagcatacttcccccaaagtatacatgccaagcgagtgtcactaaaaatggaaagaataaatttattaataaatagtaaaaaaaataaactttaaataagaataatataaatatagattgtttgtactgctgatctctcaaatggaaatcgatttttttggtgggcttgttgttagcgttaagatcttggatttcagaccgatcgataacctgacccataacatctgtatagacaaatacaataaatctatgaatataatgactacataagagataatgcatgtttgttctaaaataaaatgaaaacttgaatctaaccgtgcaagatatttgagttagtggatccagagaggatcacatcaaacttagcaagtgagaggaacaaagaatcagaaacggtatcacatggagagaccgtggttttgaaaacaaaaccaatcttgtatttcaagtcagaaatacgatactggtcacttgtaggatttagagtgattgtcgtaatgatcttccaaacaccctcggttacgcacctttcaaacttcttgatctgctctcttctcacagcagcatacatcttatcaccctatatgacaaaaataatttaaataataattagtaaaagaaaatgatgcttgaacacactataaggtttacgaaaacataaagttgaaactataatacgtacagctttatcaaccaaaatcattttgatggattcaccagcctttacagaatattgcctccaaacattcatggtttatcttattaacttcgatttgcagtgtagtcccctatgatttattcataacataaaagtacactcgaatactttgtagaaacaacatctcatgtttatcttctaacaatatcggacttgcaaccatctgacaaacatcaaataaatgtagaacaatcggtaactaaaacgcattgtttgctaattcattcctatgcgattagttttcctatacacatgagtaatctgaactatccggtttttatatattccatcttatttttaattctataaactacatcttattgttagttttccattttatttaagaaaattaaaaattaattatatatatagacatataaatcaatatttgttaatatgtttctttttttagtttcctttattttgtttaaggaaaaaagtaaaaaaaaatctaatacatgtcaaaatcttagattgataaactgccacgtgtcataatctggtgagttagtaacttttgaaaccgtactttatataataagatatttattacgcttattaccatatttcagtttggtagtcttattatgcaaatttatgttgctgatgctgatgcatgtcctattaatgtatagatctcgggacgtatttgaagatgagtgatagattgatcgaatcaattccattttttcaaggtggcatgaatgaaaaagatcaagaaacgggaaacagtgtggtagtgagtagtgtaatgttgcagtttgatgcggtaaggaggcgtttaagccaaatttggaatctgcatggtgaggttgcaacggctttacgtacttttaagaacctcaaaatgtacacaaacaccaaaaagcgtgtcggtttggttcccgggttgatgtaggagacatctttttctttaggggtgaaatgggtctagtggggctccattcaggcaccattgacatggagtttataggagttgaagatcacggggacgaggagggtaaacagattgcagttagtgtcatctcttcagggaaaaatgctgacaaaaccgaagatcccgattcattaatatttaccgggtttggtggtacggacatgtatcatggacaaccatgtaatcagaaacttgagaggttgaatattccactagaagccgcttttcggaagaaaagtattgtgagagtggttagatgtatgaaggatgaaaaaaggacaaatggtaatatttacatatatgatggaacatatatgattactaataggtgggaagaggaaggtcaaaatgggttcatagtgtttaaattcaaattggtgagagagcctgatcaaaaacccgctttcggtatttggaaatcgatacagaattggaggaatggtttgagtataagaccaggtcttatccttgaagatctctctaatggagctgagaatctaaaggtttgtttggtgaatgaagttgacaaggagaatggtcctgccttgtttaggtatgtcacttcacttatacatgaagtaatcaataatattccatcgatggttgatcgttgcgcttgtggacgtagatcatgtggttcaaaacatgtattcagagaaaagcttagtgtgtcatcgtcattggtgattagtgcaaagaagtcaggtaatgtggctcgatttatgaaccatagttgctcacccaacgtgttttggcagtctattgctcgtgaacaaaatggtttatggtgtctttacattggcttttttgcaatgaaacatattcctccattaacggagttgagatatgattatggaaaatctagaggtggtgggaagaagatgtgtctatgtagaacgaagaaatgttgtggttcatttggataatgattttgtattataattgagtgtttgttagaatttttcgcttgctctataatcttgtagtccattcgttttataaataaactcagtttaaataaattgattagtctctatggtcattaattaatttcgtaaaatcaacaataaaaaaatcactagttcaaaaacataaccactacggttcacttaatatagaaatgaattgattactgtttaactttctattgaagtctattagtgtgtagaggaatagataagttagttattttgttgcaaatttttctcatcttaatgctcattttaaatttcatgcttctcgtgtttgattaggtctaatcattttcaaagagaaattctatcattcattgctaaagagccaaagtcatatatgtttaactttcatttttacttgaatactttaaacgaccgtacaaattggagagtcctttgataactagtataatttagttaatatgcacataagtaagagttgctcggcatctatatacaacagttacatagttaattaattaactaatttacacataaaacaacatcgatgactcaagcaaacacagaaatgtgaagatgatagtgatgggcggatcaacaacttgtagattcaccatatatatagtcaagaaccgcgattactccaaaaacaaaagctttatccacacttggttttgtcaccaccttatatatatctctactcccaatccattcttttacttgtgcaatgacatttcctttggaatcaacgatgctacaatccctatccgggaaataccctttaacatcaaagtagcaattccccggtccaaccgagatgcggattgaactggttatggagaagcaagagtgtttgggatccctcaacgtgaaaaccggtttaggacttccttggtagtcgtaactataacctttccacttgttatgaatgctcaaagcctgcaccactcctccctacaccaaccaacacataattctataaaccaatcaaattaaccttttctcctctaaaggaatctctatattaaaagggttgctttatcttgacgcattatataaagtaaaatcattattgatcactagttgttgtttagaaaattgctccatcactatttcacctttttaaaaaagcttattagcattcgaaattaatcctcaaatatttataaagaataaacttatatatataatcatacaagtttggaataataatgagatgtttgggatgaaattaaaaggatacctttttgtggatgagaagcaaatcgttgccatcactatctctgagaactaactctcctttggttccaagaactccacaaccgtcgatcttgaaaactatcttttctttgtaatctgtcaccacaaagccaccgccgttaaccacgtgtggccgtcgtctcaccaccatcacttcctccatcgaggaacaatacaacttgctcaccactgctttcatgttcttgcaactaacaaactaaactcttgtattagtcttgtatatatagatagatattcttatggcggtatgggttactttttttgttttgttttgtttcttgactctaaagaaagcaaaagaagagaattggtccactagttggtcacttttttcaaatgtttggcgacgtacgttttgacttttaactgtttaagcaccacgtctcaacattgtttattataggggcggacatttcggtttaacttcaggttcggtttgggttcggttcagttcagtttatttggattttgtaaaattctaaccatattcaaccgtaactagtttgttttggttagtgtttgggtcagttttaatttggttcggtttgatttggtttggttttaatttggttcggttttagtttgattcaaaaaattaattaacgtattaaattctatgtttaaattgcataattcaaacaaaaccatgaaaagaaaaacctaaaaaacccaagacatgtgtttgtggtttacaatattattaataaataaataaaaaaattgaattatgcaatttaaatatacagtatgaaaattcaaacatttgggttgagacaaatgcataattcaaacaaaactagaaagaaaaacatagaaaattcaacctataaatatttagaattatttagaatattattaatataattaattaattaaattaataaatacattggattattggttcggttcgattgtaaaccgaaccgaaccgacccatttgggttgagacaaaatgcaaccaaatggtttgagtctaagcttaggtttgatttgggttggtttgaatttgattagatcgggtcagtttggtttggttcggttaatatgcacatcataatattttgcaaagtatgatgcaaatctgttaatattctaattattatccagtaaaaaaacaaatcgtctgggagaatcagaaatcatagagtgacacaaaacttccaaatctaaaaatttgaagttcattggtatatagcagaaaaagacaaaaaaaaatccatttggcaaatgtgaaaagtttagtagtaacatgcaaattcgtgtgggagattgattacttgtgaagccggaggacaattgtgtgcaagtcaaaatcctcttttgctttttttcgtttttgattctctcttacccatttctatataattatattacttttatagtagtaatataaatccctcagttttttcggccacaaaataattatccataaatgtaattgcttaaaaagttttatatattctgctattatatatgagtgtatgtactttttttttgccgtctaaatttattatttattacaaattatgaaaactgttacatagacgattctactacacacaattccttccgacctttattagatccacgacagacgacacattcttctcattctccatgcgtttgatggatatcttcaacattttctctgcgtaaaatcttggcgaacggctataattgtacttcgttgtagacctcatgtacacttgcctccattaatctgcaaatttgctaataaactgtagtagctagaactcgaaccccagacctcttggtgtagaaacattaatgaacatttggtcaactattgggccaagggggcttccacagtgtatgtgtatgtacttcttaataatattttctttattaatgtagatgccaatatgacttgaatcaaaaccctattattatgtctaattggttcacataatcttgctcaatatggaagtctagtttttattctgataatattaagcctccttcttgggttgtaaacagtttctacactaaaaaaaaaaagtggttcacataaaagtcaacgcttttataccataaacataaaagttcaaagatacgtttactacgttagttgttaatttgacttttcatagacttcaataacaggaaaatttgaaatttattagaggagagaacaaatttaatcatttaaaaatacaaaagcaaaaagataacaaatttaatcattaaaatgtaaactaaatagaatttaacccgcggtataccgcggggctatattgtttacaaaagtataatgttatttttttaaagattaactgaaaatatatcatattaatttgtatttttcaatgtagttatcaatctctgtattatttagtttatgattactattgtttaggtttattgatatgaaaacacatatttttttaagtaatgatgtatggtggattttaaaattttgaatattttatctgcagtataccgtgggtcgattttttatagctaaattttttaagtttcaagttatattcgttttgttaatattatatggtttttgtgtttacggttgtagaaatgtattttaattgtaaattttaagaattcatccgtgatatactgttctttattgatatcgattaaaacccgtcatcccatataaactcgtctatattatctcgttagctaaatattagtattataaaatccaagaaaataaattatttttgttataaatacaataattttaggatctcacctgtgttataccgtttcttgaatgattttaaatttctactactaatatagattttaaatttatcatagaaagtatatgatttcaattttttgtatttttttttatttaaataaagcaacggcttaaatgatgatatatataattctttttctgtatgtgtatatgattttttatgtgaatatttttattattataaattagtatttttttgctatacaaaatgttaatataaatatttgctataaatcgaatttatgcatatttgtggagtaagattcacggaattttgtttttgaagatatatgaaaagattgtgtagagatttttagaaacaaattaggcaagatatcgtttggttaatatctttttaaattttgtaaaactaaataataaatgtgagtggcagccattataaataagtcccaactccacgatttatttcacaaaatggctgcaaaaatgtatatgtagatatattgacaacaacggatccataaacattttcttagtatatgcaaaaataacaaaattttaatgggtaactcttatggaaatttgcatgaataaccaaacaaaaaatctaaattaaatttctaacacctaataaaaatatcatcaatattctgtgtattttgtgtatttaggacaattttgtccttccctcttcaaaccaccatcatcaccttcctccaccaccactactccactaatcaaccaccttcctccattaccaccactaccggtggaaccactgtcgccggaacaccatcgtcggagctactactgtcggaaaataatcgcccgaaaatcgtcgctgaaaaatcgttgccggaaaattatgtcctttgtttgaccatctcttgtgtatgttgcatatccaagccagccaccaaaaatttgtcaccgtttctctttcttgtttaccttctctttggatttggctatcttttcttctcggttagatttctattttcttctctctcaccatctcttccttccatcttctccgatgatctcgaccatatctcttttcgtctgatgtccacttgcctctctcttttcagttggaaacggtaaagcaaggatcgtttagactttgctcatgtgtcaaagtgttacttacctaattaatacataaaaggtgctatatatttaattttatgtttttttttgttattgttgcaaatcaccctaactcttaaaactcattttttttttgtcaaacaatttgtattcattccatcacaaaagcaaatacaaaaagagaggttcaagaaaaccaaagtttaagacactaacattccccaatgtcataaaatgaaagatacgatacatcgattttaaatccatgagagctttgaaaccatagcttggaagcgcattgaaacaagtgagatcacggtgaatcgagaaagcatcctcgaaggattcgaaggacgccagattagtcatggtcataggaccctgagacgttaacgaaggaatcaatgataagtttctcaacatagagagctgcactaaccaaggtagcacaataacaaggattcgggagactatggtgctatagtcgattgatgatagctttgaaacccaaagcgaaaggtttagacatctccaataaaatgcaataagaactttaacgtttaggaacttgatgatggagatgatggtgaaggtacgctgcttgagagcgacgctcgatgagctaattggagcataatggtcgataagcacaagtggtcgaaagccacaaaaaacacttcggcacaatcggttcgagatatttcgatcaaggttcttcaagcctttgtaaacataccataagcccctaaatacaactaaaaccaggaatatcccacaatatatgcaaagtcaagacaacaatggtgataactctctcacatggagtccataaccacggattagagaagatcgacacaagttatgtcttggatttaacatagaaataaaggaaacagacctgaatttttttgtcttaagatagttaatccaattgatgggcttgggccttctaaatagggttgggccaaaagaagaaagtaggtccactgggaaaaaccctagtttctctttggaatgccaagacaggaaaggggagaggcggcaatctgaagcttgcgaagacaattgcggtgactgcaacatctccggtgattggaagatcggcgggaacagtcgctggccgtgatccgaaactgagacaaagctccaagggttcagatctgaagcgagggctacgaggaagaaatggagataaggatttgccagataactcatcttttcttcttcacttgatgatgaagatcggctgagaagcgaagtgaggtggtacaaaacgtttaaagaggtttgatagaggttaaacagagaaaaaatgatggagaatgatttcaaaggagaacaaacaaagaaagaaaagatgtgaagcagcggtgaaaggaagctggaatcccgacgccggcaagcaaaagcttcaccggcgtcggaaaaattaatcagcggaggagcctcgataatggtgccagagagaaagagagagtagcgctatcttttttttggtaactcttcaaactctaaccttacagttttgctaataaatcacggttcacaaaataaatattttcttttgcattcataccacatgaagttatacgttgctgagatgttagtcagttgtttctcaacaatagtagataccaaaaattcatcacggtacaattagagatgagggtaaaattcatcagttatttttaaaaagactatttagagatgatggtaaaattagaatttttggtgttgtatgaagtaatcaatgcgtaaataacaatatttaattttttgaatattaaattgcacatatttattattatgtgtattatttttctaaccaaaaaagtttggatattaaatgtttaaataaataaataaaaaatatttggaatttttcactaaagttaaacttaataattaaatttaggggatattattggtttgtgatttaaatagtgttttaatgactttaaatgttatgagaaatttgttgttattcaatcaaaatttattaaacattgttaatgtctagtgctattattttttatttataaaaaagcttctaaaattttcataaatctgaagttattggattcatactttaataaagtcattgaaaattttgttattcaactaaaaaaagtctttaattgttactgaattaaattattatgttattgtgtatgattttctacacttttattcacaaaataaaatcatgacaaatatcatcaaaacagaaatattgtttgaaagtccaaaagctcttttcattgctctaggagaactaccaaattaccaaagtaccaattcccatttgctcgcctttttttctccagatcactacattcaaagttaagaaaattccaaagcaataataaactttttgatactcttattatcaattagagcgtctaatgatattgatcatataaaatcaatattatttatataacatattttctaaattatccaattaagctatgtagtaaaaacatttcctccaactttatcatttagtatacaaaaattgttggcaaaatcaaaatataaacgaaagaatgagcaaaatatgtgcaactaatggaagaacaaaaaagacttatcaatccattaatgacctgaataattctatttttcaactcatttcttggatatgactcaaatttgtcttgttaagatttttataaatctttataataatactatagtgatgttacttaagataattgatgcaaagctataaatgttttttaaataatactataatggtgttacttaagacgaagaatgccacaacaataaaggacataaagtggtgattggtgaaagtgaccatcatgattgttctagcaataaagccttgaatggctgcagtttttggcatagtttttggattttgattttgcaaaaaccaaatattacccaatcatgattctacaaaaagtagatttcttaacaattaggaaaacaagattttaagatattttgcatatttgttcacagaatctaaaaacccaaattaggttttttctaacaatttacgtcacattttttttcaaattttaattattattttaaatatgctattttcaccatttaccattcattaaatattaaatgtatacattggttttatttaccaaacctatgtttatatgcaactagattaggacttttaatttttttaaaataaaattagatttagcaaaatgatacattaaaattttatagggaatagaaactttatataataaaatatacctatgcttttgtttttctgcatttttaatttttattatcattattttgtaattttaaaacacaaaataaaaactaaaaattaaatttgataacttaaaaagttttaaaataatagttatgtagaaaaactaaaaactaaataaattatcattcaagattttgcaaaaacaaaatctacatcaaaaaatcataaactacaaaaatcaaaaaccaaaaaccaaaatccaaaaaccagaaactaaaaaccaataataaactagaaaacattcagggcctaaactttttaccattgtttatattcagccccggcttaggcatgtggtaggagtgccatagcacaagatctattcaagtttttttctctttttttttgaaccaaatagagtccaaaaaaaaatattttcaaaaaggttagggaaaaaggttattttttcttttagcttaggactaaagttttgttgagtcggctctgtttatatcagtaggaaagctggatcttccacagttttaaaaattttatttgtttcttatccttgttaaaaaatgtggcctccctggtcgcctaagcactcggtggccggtaaccgtcagaatttgtccaaatcgcttaattcatcagaggatttattttttttagtttatggagtccaaatcgcttaattcatagaggaattttttttgtagtttatggataaaatacatgttagatctatcatatttgtgcacaaacaagaccaaaacgagttaaaaatgatgtcaaatgtctaaaaaccgagcagtcgtcattattagggttacaaagtcgacaaactttgtgaagaagatgattatgtaatgtctgttttaccctccattaaagagtaagttatagaaaaagttatattacattctagaggctcaaactcattaacataaacaattaaaggtttacagaaaccacttcaccatactaactttaaatgctatgtcaccaaataatatttatatatacatataattagataaaaaccctaaaacttatcccgattaatttccatataatttttgattaacggattaatcagtagacccggttcgatcccgactaacgcctaccgattttttgaacagggttctttacattcatttctgaaaacacatggaagaccttgtccacaacttaacattggtttattcatcgctagctatgggccgggaaaattgaaacatgggttagagcctccaaaatctaagcttatataaaaatagctgccctaattatttttattgcaaaacaaggcccctaagtttatgaggctacaaaatttatcctcacgaaaccaccaaaatgttttattcttatagctcctataggacatgagtatgaccaagcatggctacaccaaagaccaaaggcacgaggatggaagaatagaatcatggtttgttttatatttaagtatttgatttaatttatctatatttgaactagcaaaaacaaaaacactcatatttacagattatagaagctaaaaataaaataaaaacagatggtttaaaaaattttagtccacaaaatcgtaatactatgtatgagggactcatgacgcatacgaatgagtgttgttctttgttttcctttctcaagatatcgtgagaaacaaaggtatgagactaatcctgtctcatatatatggatccaaagacatgaaccccattgcgtacttctggaacttgaggaattcacggtcttctaactcgaccatatcccatgaaacaacactcaattcttgctacgatttggccaaaaaatggattgattcatcgccaagctcggcggattgttcatgtaaacttcaatattttattcttccacataatttaatttatttattacataaatactaacccatcaaaatcaataacctggccaaaacaaaacataatcaataaatatatgcaaaacatagtcaataaataaaaaagtatagttaatcaatgacctcaacagttccatttttcaactgatttcatttgaaaataatgcatatttatcttgttaagaatattttaatggttagttgactaagactctagtaatcttattcataatatttttttttgaatgaacatataagtggttataaagtggaaatggatcctctaaattttcacaaaacacatggaagtaagggtgggcattttggtttaattttggttctgttcggtttatttagtcttgtaaaactctaaccaaactcaaccgaagttagtatggtttggtttgggtttgggtcaatctatgtttggttcggtttggttttagtttggtttaattttaattcgattttaaaagactaatcattgtaacaaaacaaaattatttcgttcattatcgtttgaactttgagcttgataatacttaacttaagcaaaaagtttaataattcaaataaaccatgaaaagaaattaaaagtgcaaacaattacatatttagtaatatacaatattattaattaattaattaattaattaagcaaaaagtttaataattcatattggttaaaccaaaccgaaccgaaccatttgggttgagaagaaacataaccgaaaggtttgagtctaagcttgggtttggtttggactggtttgagtttggttggttcggttcggttaaaatgctcatccctacatggaagatagtgatggatcggactccctgatttccatgttcgtccaactaccattccacgagaatttgcctcaagcgatggtgaatcgaagacagatagaatggaaaaaagctgataggaaagcaaaacgaagatacaaagtgattcatatattcaaagcctagaggcaagaagactatacgtaaaagatcaatctctagcagaatatctccaacgttagtgttgttgttgccgccatcacttgtggaattcataggtttgtgaagtatagctcacgaaatatgaatcttttttacaacatattgtttcctgtacgcatgacctagcaaatcatgatagacgaatacaaatttatttataattcttttgccaatcttggggacgcttttacgggaaagaaaatttcttactcatcgtacttagcttcaaatcctaagtaagagttaatccaaatttttacccccccccaaaaaaaacagttaatccagttagaaataattaatatccaattgcgtcagcttcacgtgattttgtattgaacgcatgtcctccaatttgtgtctagacacttgagtgatgtcagtgatgacattatgtcacattacttttgttgcttatttgaaagatactattacatcagtatgatggttaaaatgaagaaacttgaagcactacatatgacgacatcaacgttcttttcctgacaacattttcttttatcatccctaactttttttgggatgctttcacctacacactcaatgactcaaaccaaaccacacaagaacacttcccactacttatggctcatgatgggctttggtttagcctaaacccaatcaagataacttaaatagaaaacatcatcactagggatgttagtttttttatcaaaaccggttccaagagaatgcaacgggacttctcacttcgtgctgcggattgctccaagtgatggaaccaaactcagccttgttcgtcatactcactcctttcttgctaacaaacgtgactgtgtacctcttcttctctcccacgcttttaaacgaaagtttcgatggtttaacagagattccgacactaggagctccattaaccgtcactttgtaaaccgagcttgctgcaccaacatttgttacttcccgagtgtaccgcacaactcttttacccccaaacaaaaccgagaaacttgggtagttgagctgaccaggatctgagaacttcttcgagcagttaacgctaggtcgcttcacaatcgcaacaatgtgatcgactgtgtagtctagagagcacaaaaacctgatgtattcctcggttgagatgtcgtagacaagacctggtgagagagccttttggggatctacatggcccgagccgtgagcatatgggttagataggctgttgtctgcagcatcatggagaggagcgttggtgttgtcaagaacgtaagctgtagtcatgagagctgatttgatagcactcggactccactcagggtgagctgctttcaaaagacccgctaaaccactgatgtgtgggcatgacattgacgtacctaacaataatcagacactttttcatgtcaaacaaaacaaacccctctctacaatcatagattaatcaataacaaaaatatgtaatcaaaatcaagtttcaaagttgagtacctgacatgatgttgaactgagtcctcctagagtccttgtcaagaccagtaggaccaatagcgtcagaccaaccagccaaaatattaactccaggaccaataacatcaggcttcaagatttcaggagtaacagtattaggacctctcgagctaaaagcagcaaccacaggagacggcttaacgtcaagaaccgttcctttaaaaacaagaagagcggttggtttagaatctgacttaacatactccctaagtaaatcaccagtcttcttccctacagcgatcgcgggaagcaaatgactatccgccacaagctcctctccactcgcagcagtattcgccattatcatccctaaaccaccagcatctctaaccacagctcctttctcaactctagcattaacacctctatcacaaacaacaatcttcccacgaacaatactcgaatcaagcgaaccaggtaaacaaagattactcgaactactattccctttattataaaccaattcaagcggcttcgtccccattcctacaccgctatacagcgaaacaccggtaagtcgtttcccgttaccgagattcgcaaaagccggaaaatctctatctaaagtaccagcaccaacagtcataacccaaggagcaacattggcaacagaagctctagtaggaccactattaccagcagaacaagacacaaaaacacctctctccatagccgaaaacgctccaatcgcaatcgtatcgcgataatacggagcagaaccaccaccaagagataacgaaagcacatcaacaccatcaagtatagctcgatccatagcagctagtatatcagatccaaaacaaccagtactccaacaaactttataagtagcaacacgagcacgagtggccatacctctggccgtaccggcggcgtaaccgaggaagctagcgtttctaacggcggatcccgcggcggtagttgaagtatgtgttccatgtccgtcaacatcacgaggagaaacagattcacgcttactcgaaaaaccaccaccagaagccatttgaaatcctttggagaagcttctagctccgataagcttcttgttacacaacttggaatcgaaatcggaaccagattcacattctcctttccatttagaaggaatctcaggcatatcagtatcatcgaagcttctagattcaggccaaacgccagtatctaaaactccgatgataacgccgttagaagaagaaccgagatcgtgaacaccgaattcggaattgagaccgagaaactcaggagtacgcgtagtgtgaagtgtgtagagaggatcttcgaagatatcgaggattgagtttgaggaggagaggagagaatcggcttcggtggagtcgaggtaagcggagaagccatggaaggaggttgtgtaagtgtagagaagagatgattctgaattgagttgagatgtgtaccaatcgtggtgagtgaggaatgattccggtttatcggagtgattgacgcggatgatgtaggtttttttggcggttgtgtggaggagaaggaagaggaaggtggtgatgattgtgatggaggaagaagaagaagaagaagaagccatgagtgtgtgtgaatgatggtgaagtagagaagaagagagtgtggggaataagaagaagaagaagaagaagatagggagagagagagaaagagtgatgggattaaaataataataaaaaaaagtggtggacacgtaagggacgtgtgaccgttagaataataacggaaatgccatcgtcggtggggttttgaaaaagagtgtgtgtgggaaatatatatacagctggagacacgatacgtgataaaagggttgttcttcagtctctcaggcccatttttctttttattggtttcctcaaacgttcttttgtgtctttttctttcttttttcaacgttctttttgtgtctttttattttattttattatatgtttataaacatatagattgtttttttaataattgtgtttgggtggatgatgttgggtttaagaatttataaaattgttgatgagtttgttgaaaactaaagatcatttaagggtagctaataaagttgttggtctgttttttagaattaagatcatttaaagggtaacaactaataaattaagggaagaaaataattggttccgaaaagaatttatcagatctatctatatttaagtttattagcaaaagcatatgactgaccggaaaatagggaatataggttatgaatttgactaagaataatataataactattttgtgaggtttttaaagtagtaagatgtgttatgttgagaaatattttttttggattttgattgaaaatttaagagtaatctatatatagtaatttctttttttttctattttagagttattgaagctaaatcgattatattttctttaaaatagaaataaaaataaatgtagacattggatattgttttttggatctcttcacagcttggtatgggagagtttgtgtacttaactcaagttgaaagacccataatgttgagtttttagatcaggtttgctaactaaaacaaattaggtgaattttgttgtcgggatacctgacgtagttatgcatacgagtgtttatatgtgtaactaaaaacgtgcaatatattcaatatatgtagcaatgatgtcacactagtatgatgaaattgaataagctctcaacatttttttgcttgtaacaattcatgtatttattacttaaaaatcggtggtcaaaaaataacgttatcttttttagtaacgtatcattaaacaatgtgtaattcacgtgttatgttaaaagtcatttttatgacgataaatttacgtgcaacagtttttttgtcactatatagctctactttttgagtttgaagaataaaaataatagttttagtaatacttgttgaaaacatgagatcttaattattcatgggaatagagaagaaccttggcacttaacaagagattttaatgacatcattgatgcatcagaaaaacaaggaggacaaatcatacatgaaggtacttttgtgaacattaggtcattcatgtcagaatgtgacttatacgatctcagacacttgagcaacttcttctcttggagaggaaagagacatgagctcattgttcattgcacactatatagggctatgtcaaatggaacaagggctaaggcttacccatccagtcgttgggagtatttaaggtttgaaagctcagaccgtcaaccacttcttactcactttaatgtattcgaggaaaagaaaaaaggagtttttaagtacgataaaagattgaaagacaatgaggaagtctctattttaatttaagcagcttggaactttgacgccatggaggatgttgaggaaaatgtcagtagatttatacaagaaatcattacctgaactaggactaagcatcaaaatagtcaaaaagccactgaagagaataggcaaaagctagaggaggcaatggcaagcccagacgctgaccaaaatctgatttctaccatcaataatagcctacaaagaagtagacaattttgggagataaaaatgttagtgcaccctctgtcagaacaatcagaaggagtgttgattgctggaacaagctggaagctgtttcagaagactaaagtgaagatcaagtaattgatgctgacgtggatatgccgccaaatgaacgaatgacgtggagaccacaacaggaggagttcagtttggaaagaagatattcacgcgaagatttggagtgatccaagatcttgaaggctaacctagaagaccgaagacctcgatggtataaatagaggtgctaaagttcttgttagacttggccgtgattgtgagtgaaaaagctagtgcaacgcttttcattgttagagactaaggtttagtctgattggaattctagagagatcaaagagtgtgttcttgtgatctgctcttgtgtgtttagggaaatctcaggtgacaaggtaaagtagtttatatcttgtgtaaaaccaattaaggtagttgtaaacttcttaatcagatttctaataaaatgatactcggtggttctgagtttggggaatacgattcttaggttcatccggaatttcatttggtatcagagcgggcatctgaaccaagatgtacttaacaacagatgcagatcctgcggagaggatggactaccccaaagagttcgttgaagtcggtaaagcaatcatattggaaaaaggaaattatggacactggaaagtgaagatgagagctctcatacgtggtctaggaaaagaagcctggattgctacgagcattggatggaaggctccggtcatcaagggagaagatggagaagatgtgctaaaaactgaagatcaatggaatgatgcagaagaggcaaaggccacagctaattcaagggcactgtctttgatattcaactccgtgaatcaaaatcaattcaagcaaattcaaaactgtgaatcagctaaagaagcatgggataaacttgctaaagcatatgaagggacaagtagtgtcaaaagatccagaatcgacatgttagcatctcagtttgaaaatctcactatggaagaaacagagaacattgaggagttcagtgggaaaatcagtgccatagcgagtgaagcacacaatctaggaaagaaatacaaagataagaaactggtcaagaaactgttgaggtgtctcccatcaaggtttgaaagtaagagaacggccatgggaacgtcgttggacactaactcaatcgattttgaagaagtagtgggaatgttccaagcatatgaattagaaatcacttccggaaagggaggttactccaaaggacttgctttagctgcatcggcaaaaagaatgagataaaggaattgaaggatacaataagcatgatggcaaaagacttcagtagagcaatgaggagagttgagaagaaaggattcagaagaaatcagggaactgatagatatcgagaccgaagctcaaaaagggatgagattcaatgtcattaatgtcaaggatacggacatattaaagctgaatgtccctccttaaagagaaaagatctcaagtgctctgagtgtaagggtcttggacacattaagttcgactgtgttggatcaaagtctaagcctgatagatcctgcagttctgaaagtgaaagtgactcaaatgatggagactcggaagattatataaaaggtttcgtgtcttttgtaggaatcattgaagaaaaagatgaaagttcagacagtgaagcagatggtgaggatgaggacaactcagctgatgaggattctgacatcgaaaaggacgttaaaatcaatgaagagttcaggaaactgtatgacagctggttgatgctgagtaaagagaaagttgcttggctggaagagaagctaaaagttcaagaactgacagaaaagctgaaaggagagttaactgctgcaaatcagaagaactctgagctgactcagaaatgcagtgtggctgaagagaaaaacagagaactttctcaagagcttagtgacactcgcaagaagatccacatgctgaacagtggaacaaaagatttggatagtatacttgctgctggaagagtgggaaaatcaaattttggtttaggatacaatggtgttggatcaggtacaaagacgaattttgtacgaagcgaagctggtgctccaacaaaaagtcaaacaggttttcgaagcaactatgatgctgttccagcaagacgcatgtaccagaatcacgatcactatcattcccggagaactgtgacaggttacgaatgttactactgtggaagacatggtcatttcagagatattgctacaggtatgctgctaggttaaataagctgaagagacaaggaaaactatatccatatcaaggaagaacctccaagatgtatgtcagaagggaggatctctattgtcatgtagcatacacctcgattgaagaaggaataaagaaaccatggtattttgacagtggagcatccagacatatgacaggaagtcaatccaatcttgaaaattatacctctgtcaaggaaagtaaagttacttttggaggtggggataaaggaaaaatcaagggaaaaggtgatttgactaaagcagaaaagcctcagcttacaaatgtgtactttgtcgaagggcttactgcaaatcttattagtgtgagtcagctatgtgatgaagggctgactgtgagtttcaatagtgtaaaatgctgggctacaaacgagaagaaccaaaacactctaactggagttagaactgggaacaattgctacatgtgggaagaacctaaagagtgtcttatagctgaaaaagaggatcgagtggtatggcatcaacgtcttggtcacatgaatgcgaggagcatgtcagaaatagtgagcaaggaaatggttagaggagtacaagagctgaaacacatagagaaaattgtgtacgatgcctacaatcaaggtaaacagattagagtccaacacaagagagttgtaggtgttgttgagagaaagaaccagacttttcaagagatggccagagccatgattcatggacatggagttcctgaaaaattctggacagaggctatcagtacagtatgttatgtgataaatcatgtttatgtgaggattggaggcacattcgacaagttggtcaaagcgtttgtgaagacaatgacaactgagttcaggttgagtatggtaggcgaacttaagtactttctggggttgcaaatcaatcagattgatgaagggattgctatctcgcaaagcacctatgatcagaacctggtgaaacgcttcgatatgtgttccagcaatccagttaaaactcctatgagcactaccaacctctgcagctgctgtactaaatttctttggatgaaacacatgggtttggattacggtatgtcattttctgaccatttacttgttaaatgtgataatgaaagtgctattgccatatctaagaatccggtacaacactcaatcactaaacacatagctataagacatcattttgttagagaattagttgaagaaaaacaaattaccgtagaacatatgcctactgaaattcaacttgctgatattttcactaagcctttggacttgaacatgtttgtgaacttgcaaaagtctctgggtattggtgaagtctaactatcttcttgatgagtgtttgtgctgaaacagggttggttgtacagtgagaagcaagttttcaaatctattttacaaagtgtcataaccggttttcaaatcttctactgtaaaaagttcaccaagagaaagagctacccttcatggttcggagatgcaaagtcagtaaagtgtgtgacagacatagtgtgtagagcattaaggaagggatgaaatgcagaaaggggcataaaagaagcatttcatttcataagatgaagcatgagcttatctaagacacgagggacaaaggagaaatcttgtcactaacccgatgggaacaaaagagaaatcttgttcacctacactttggagagaagggatgtcaaacaaaaatattgagagaacaagtaagaaagagcatcactacactctgcaacaagacaagagaaaaaaaaaagaaagggggtgcaaaaacaagttctctcactgacatctcgtctcactgtagaaaggagcagtaagaagcaacaataagttctgaatacaaaagatcagacttgtaatttatcaatagcctgattgttgctgcacagtctgtcacactccttgttaaaaggactcgctaacactctgagatatgacggtgtgaagactactcttggagaatcaacattgtcttttgtgttgtgtcagcagattatgttctgaattttttgatacaagttacaatgagcttagtattgtacaatcacctctgggacagttctggacctcaacatgagggagagatggttattactgtgctgatactaatggggacttgttctgtatatatcaagatggcttcagaaaaatgagttgactttcagaggtactaagttcaattctataagctaattgggttgttcagttttgttttatggtggttattgtgttttatgagatttgaccggaccaaaatccggttagcactgattttcggttttgagtttctatggtttgcataaagggatctatcgaatgaaacaagtgagaaaacccagaaaattgagctctcacgccgaaacactagcaatgggagaacacgcagcgatgcccggcgtatgcgaaagatgtttaatccagagtatgtgtttggcacatccttacctgtagatttaagatatgtctctaccttgctgacgacaataacgacacatatggaaggtatggtgtcttggtcctgtgctcagtgtctggtttaattggtagagtgtctagatagagtttttgatcaattgtgtcatgcaagcagggggagattatggactggtccctgagaactctaattcatttgtaaactctctagatgttgataacgaagaaggctttgaagatactcaatcttctgattgtgtttagatctagttgtgggggagtttaggattaagggggagtttttaagttgtgtttgttaatcatgtccttttggttttaataggtctttgtttctaagtactagatgatgtgttttgaatcttaaaacttatttctgcaatctatgatgagaccctctattggttatttccgctgcttattatctctatgacttgatgtgtgcttgtgagttttctttgagggatttcttgcaggattgcttgaattgacaaattgtatcaaaaagggggagattgttagtgcaccctctgtcaggacaaaccagaaggagtgctgattgctggaacaagctggaagctgtttcagaagactaaagtgaagatcaagtaattgatgctgacgtggatatgccgccaaatgaacgaatgacgtggagaccacaacaggaggagttcagtttggaaagaagatattcacgcgaagatttggagtgatccaagatcttgaaggctaacctagaagaccgaagacctcgatggtataaatagaggtgctaaagttcttgttagacttggtcgtgattgtgagtgaaaaagctagtgcaacgcttttcattgttagagactaaggtttagtctgattggaattctagagagatcaaagagtgtgttcttgtgatctgctcttgtgtgtttagaaaaatctcaggtgacaagctaaagtagtttagatcttgtgtaaaaccaattaaggtagttgtaaacttcttaatcagatttctaataaagtgatactcagtggttctgagtttggggaatacgattcttaggttcatccggaatttcaaaaaatactggatacttccatgccatcactaggggcagaacaattctaaacaagtgcttagtgattgaggatatggaaggtgtacctgcttatcaagaggagagcattctaaaggttatatcaaactattttcagaacctttttacatcccaagacggagagagaagcgacacagtaaaaaaagctatcaaaccttacatttcatcggaaaccaacttagctcttattgtgatgccattgaagaaggagataagaaaagttgttttctccattcatgctgacaaggcacaagggcccgattgtttctcagctagtttcttccaaacgaattgggaaacagttggtcctaatattgtcctagaaataaagtctttcttctcttctactaacctacaaaggaccatcaataaaacccacatcatgcttctaccaaagatccatagtccactaaagatggttgactacagaccaattgctttatgtacggttttctaaaaaatcatctccaaattgctttcctaacgactccagccagtcgttcaagagataacttcaaaaaatcaatcagcatttgtaccaaaaagagtaataactgataatgtgctgatcacacacaatactctacactacttaaagacttttggagctaagaaaagatgctttatggcggttaaaactgatatgagtaaagcctatgtttgtattgagtgggatttcatctaattagtaatggaggaaatgggttttcatcataagtggatacaatggattatgcaatgtatatctacaatttcatatttctttctcctaaatggctctgctcaaggtgctataataccctagagaggaataagacaaggggatcccctttccccttactttttcattttatgcagtgaagttttgtctggtttgtgtagaaaagcacataatgatgggttgttacttgggatccgagttggaaaaggcagttctagagccaaccatatgatgttggtagatgatactatgtttttctgttgatcagaccccaaatcctgctcaatcataacgaatatccttcatcaatacgagacaacttctggctaaatgataaataaagccaaatcagcgctattttctctgccaaaaccacagagatttctaaggccaaagctcagcaaatattggggattcaaaaattgaagggattaggaaaatacttgggcctacctaaaatgtttggaagaaaaaagaagtaccttttcaatcagatcatagaccgcataagacaacgatccctaaggcgaatcttgactgcagctagaaagaccattttgttaaaatcggtgctatctacaatgccatcttatacaatgttttttttaagctcatgtctcactctgtaaaaggatacaatcatctttcactcgcttctgatgggactcctctacagaaaagaaaaagatgtattggattgcattgtcaaagataacaagatcaaagagagatggaggacttagtttaagatgtcaataaatttaatgatgccttacttggaaaactgaggtggcagatcattacaaaaccatcatgcctctgaacctgaaacagggtattgaagccacaaatcgtttggttttcccttccacctatagaaatcagtcttagtatgttatcctcgtggatcttgtggatgctctagtcatgtcgaaataagaaactttttgagcaaaaacaccaattaagcacatctctaatctctcaagccattatttaagcgaaagaatgaagcgaaggatagattaaaggtaaatctacccagaaaattcccaataccctttcatccccaaagatcagattgggcatagtacgttgctttacagatgcagcctgccgtgaagactcgcaacacatgattaggatggatcttcaatgatatgatatcatgtgcagagacctcgttctgatatactgaaagaaatataatttcgcctttaattgcagaagcaatcgctattcttctcgctctacattaggcatcagatcttggaataaaaaacttctcgtagcttcagattcgcaacagcttctcaaagctctcaatttggagccccgacctagggacctctatggaattctacacgacatctcatatgtttcactatatttcgaagacattagtttctcatttgttaagagagaactcaaccgtaaagcatatacttcagcaaaggtcgctatacattcaatttcccttgtacttgcttgcatttaatgaaaatcaaggttttagacaattttttattttattttaaactatgatattaagcctatcatgattggatgatttatggatcggcgtataatacaacctagattttgttttctttcgccaaaaggaaaggttaaaaaaatcagttccattgtggagctgtatgcaatgcacaaaaaatcagtacagttattcaaatttatctgttttttttaattatcctgtctcattctgcgaaatagaaaaacgttttctattatatcatcagggtaatgatccatcaacccgctaatttgttttatgaggcacaaacaggagaatttatcttggaagtggaagaattactaaaacttcgcgaaaccatcacaaggatttatgtacgaagaacgggcaaatctatatgggttatatccgaagacattgaacgggatgtttttatgtcaacaacagagcccaagctcatggaattgttaatcttgtaatggttcaataaataatatgagcgatttcatgcaaatctatttagaattttataattttaaaaatttgtttggatttttttcataactaactgttttatattataagacattttggtcattaatggaatatttacatctttaataaactgacaattacaataatattttttatcactgtttgaaataaagatgtgttattgatattttctatttctcttttcctctacataatttaaattacaaggcatataaactagcacaaaattctagactttatgtgtatgatataataatttatgtacactttatatctttactttggtttttagaccgatctaatttaatagatagtatttcctccgttttaaattaactataattttggaacctaaattgtatttttcaagtgtgtcaaaatcttaaactgcacttatttataaatagaaggagtagttaatacaaaaatattgatagtttaaataagtctaatagagaagaaaaatatatataaattatttactacaaagaataatagcagtaaaagaagtcaaccactgaatattacagatccacattggtattaaagagggggtgggggtgcagagaggtagcttatttagcaaagaaaagtgctagtttttaaccgtacattaatatttggttaaataagagttttctctcactttggttaaataacggtgggtattacggaaacaaaaggagtaatatagatcaataatttcttaagaccataaaaatgctagttttttttctctctgtaaaatgattttttaaaatttctaatatttttgattaataagataattttctatttagatgatgatatatatatgtatatatatatatatatatatatatatattggtaatcttcacattaaacaaattatcttgaaggatcatgtaataattcacttatcacttattaatttaagcgaataagccttaagatttatatttttcagaatcttctttttttgttgcgaaaagctttttttttttttttcagaatcttcgaacccacaaatacataaaattaaaagtatatccggaaactagttgtgcacatgtatacacaattaacttaatatatctcatattcatgaaaaagtacatctttctcagtggaatcttgactctataaaataagaagacatggatagagagattggaatacagacggaagactgtcaatgattgtgatcttagtgttacactttgatcccatatatgctccaaccatcactactccgtgtcccacgcaatagattacaaatataacaatccactcacttatctttctatgcacataaacataaaaattagttggttcgtattgaataaaaatgagaatttgattacaaaagaaaaaaaaaagactaaataatcaaagtgtaaagatgatgggtgactttctgggaaattctcgtgttgcattccttttttttttggaagttcttttgactcaatggttgacaaaaggttcactaatgcttctataccaaaaggtctgggattcaagtcctaactactgcgatttattagcaaatttgcagatcaatggagacaagtgtccacgaaatctacaacgaagtacaattatagccgttcgccaagattctacgcaaaaaaaatattgaaaatgtccatcaagcgtatagagaaggagaagaatgtatcgtctgtcgtggatctaataaaggtcggaaagaattatccgtggtagaatcgtttatgtaacatttttcataatttgtaataaataataaatctagacgggtaaaaaaaaaagtcaaaatatagagaatattttttttaatgtatattttccatggacatgatattaaaacacttgtttaaaagcataaagctttcggtaaaaagagtgtgaaatttaccgaatatatatatatatatatatatatattatggtatatattttctcatactttttatttgattttcaaacttcagcttgctaacgtgaataaaagaatcttatatatttccgtggaatatgttttatataaacaacttatatatatatatatatatattttcaaaatatcacacagttacaaacgaacatataatctttgattttgtagaggcaaatgagtttcactattaccaaaattctgtagatcttgtaaataaaacaagatctttattaaaatatatatatatatatatatcatcgcaatatatatttgtaaaatattttaattttattaatataaataatatttataattacgtaatcaactataggtctatagctaatagccgtttaacatttttctcgtcatctagaacacatattgcagaactttggatatgaggccggatagagaatatggtatcatctagttcaaacccattatattaaaaggcctgccaactactttgttatttataggcataacccatataagttatggaaattatatactaagaaacttttaataagaacgaaacttgggtttactcttagggtgaatcctttttattcaccttattttgtattgatcaataaaaatatgccatatcaaatcctacttaattacataataaattaaaactataattataaattcaaaccgatatataatcttgtttaattacaaaatctaaactttaattttcctttgtaaacccaaaccgccatttaaactcatttaatcgtaaaaaaatctaaaccctaatcgtattttgtaaacccaaaccgacatttaacctcgtttaattataaaatctaaatctgtttataaacctaaaccaatatttaatctgtttaattataaaatctaacccctaatcgtactttctaaacccaaactgatatttaacctcgttttctaataaacccaaaccgatatacaattttgttttagtggcaaattagattttataattaaattaaattatttttattattattaggtgtcagattttaattggttaaaataaatgatgaccctatcatgttttcttacacattttcatttctaagctatttaaaacacagtaagttaaaataacttggaaataatatttgatatataaataaattaaaataatacttataaattttaatgacatattcaaaacttatatatatttaaagactaatatattttattatagtattgactcctaatacaagaaataccagtttagtattcttaatttttacaaataatgtttataaacagatattgtacagtcaataatcttacattagccgtattactaagacttgtcataaaatgatagtaattttaaattatagcaaatggggatagtgggagattagtaggtaaattggcagaaagttaagagactttatacaatcgttagcttatctgtcaattgactcttacaacaatgaagatcgatttggtctcagatatttgtctgtccatttataaatatacacatgcacgcctattctagatataaaactattataagtaactaaatgcgcaagctgtatccaaatgattctaattaagtgactatataataatatacaactagatgcaattcccaaaagtcttaaattaaccctaatcatctatgatagtatatatatacgtaatcaacactcctagcaaattagtatatgcatgctaaattgtgaaaactaaagtgattggaaagtgtcgatataaattaatgtgattatcttatctttttgtcgtgaaactgcaatatccatgccactttgtttgatccttgatgttttagggttttcacgttgatcagtcgcgatcataaatatttcaaatataatgcaaacttgtagaataattaatatccaccaaagaaatgtccatatattttagacgtgatttacatatactttatgagactgatccactatgttgtgagaagacaaaactttgaattgaatcatatatccacatttaatttcattttattataacgtacttatatgtccacatttatatataaattatgaaaatgaaagaggctatttatatatgcaattgatgttgttatcaagcacatcatatagtcttactagcctaaaagaaatttattcaaattattaaaaacgcatatataattggtccattatcatacattttattaaaaatgtatatataatttttttttgataattaggagggtcgggatcgaggcccttaatctcccagagtccgggaaagaccaagtgaaagcccctgaccaaatgaaaataactagcaattttgcggttgaaagaaatcgatttctgacctgaaccaataaggtaattcctcctcaagtagaaaccactagactaacactacttgattttgaaaaaacgcatatataattggtccattatcataaatcataaaagaaaataatatcaaaaacttattaattagcattttccatttaggatgcgaaggacaaaagctaacggtgaataacgcgtctttcgttagacgacgaaatgttcataaacaaaagaatatcatattggaccgctcttcttgttcttgcttttgatttgatcaaacaaaacaaaacaaaacaaaacaaaaagacttacaaaaaaacaaagtaagctcaatttttcacaaaaaaaaatataattatatattcttacattacgaaaagacaaacgtatgaattatttacattagattaaaggaaaaaaaatgaattttaagagttggtgtgactagaaaaacttagtaccgttccccacctgcctcacttctcaacggcgaattcactccatttctcaacgttctccggtgattttccgttgaattcctcggcgacttggccgtgggagatggagacttggttgtcggagatggagacgaccggggatgattactttgttgttgttgatgatgatgatgatgactactcttacgtggcttattaccaacacgaccatcatcttctttattgtccggagtgtttggcaccgtgtaagtgaaagtccccataggaatatcattatagtctttaagatcattgagtatagagacgacggcactcatacatggccggttcttgggtcgatggcttaagcattggtaagccaatgttgctgcttttcttgctcctgtctctgagtactgaccttcaagtctcgggtccatgattcgagatagtttacgtgggtcattgagcattggacgagcccagtccacaaggttttgttccctcgatgatctctttttgtctactgatctccgtccggtcaaaagctctagcaacacaactccaaagctgtatacgtcacttcttgctgttaaatgaccggtcatgatgtattcaggagctgcgtagccttgtgtgcccatcactcgagttgacacatgagtgtcgtctccttctggtccgtctttggctaacccgaagtcagagagtttcgccgtgtaatcctgaaaacaagatttggtataggagcttctttagaactttaggaattataaattggaaaataagggctgattggtaacgactgttaatttcggttgtaaacgcttttgctgtaagaaatttgactgtaaaaactttgactgtagagactttaagagtaaaaatcgggttggattttttgttacttacggaatctaacaagatattggaggctttgaaatcccgatagataacaggattttcagcttcgtgtagaaattgaagtcctgttgcagctccatgagcgatcttcattcttgttgaccatggaagcgaggcagagtatcctgaaagattaatccaaagtcgcttagaaacacttgtcataagattagttccaaaaatatatttatctgaataagaaaacatagagaaagagaatgagccttacttctgaaaagttgattctctaagcttccacgaggcatgaactcataaacaagagttctatgttcttcctcacaacaataaccaatcaatttcaccaaatttttgtgcttcaattgtcccaaaaacataacttccgtctgaaaagaagattaaatccaatataagaaaaaagaccaattaaaaaaaaaggaatatttttagaaaagatactaaccagccattcacggtgaccttgaagaccttcaagatcaagcaatttaacagcaacaggctgagctttaagaccaggacgtagcttatcatcaatgaaacccttatgaacaggaccaaacccaccttcacctagaaaattggtcgatgaaaagctttgtgtaatgactttaagctccgctagggtaaacacatgaagatctgatccggccaaagaaatcgatagatcttctgacaaagtgttggaacttggattgctcatatcaagtatcgatagtctttgaaaagagctctgtttcttgatgacgtcattttttcttttaggtttctttgaagatgccattagggtttctggatctcctaaacatccaacgattagtgatctccatgaaactttcttcttcaccgccattgttgttgattttgtgtttcttttcttcttcttgtttggtttgcaatgagagatggaatggtttttaaagaaaatgagaagaagactttataatataaagttttatgttataaatataataactcggtttttaatggtcacgaggagagatagaagaagaagaagactttatagattactaatttcaattcaaattcacctactactactactattgctactcctttaacacaaagaaaaactcattctattggggtggctttatattgacattgaaataaatcaccctaattttataacacatgcttattttattctttgttgatagtagtttctaagaaaattattaacgagttgattttttagtcagtggtggggtgcttccaaaattgtagacgatgacagcttttgccctctttctctaacgtgttatctttttacgtcaatggaccataaacatgtgattctgatgcaatgacgccaaaaagaagtttctgataaaataataattttgtttagtattttcttcgaatttgagagtttgagtatgaatttaaaagaaacaataataaagctattttgtatgtgtgcttctattttgttttcatcatttttagtagttacaagctggatagggtggtggtttgtaccagtcaaaattgactactagttttggtaataatcacacgatttcagtaaaaaaataataacatattttcatttacgaaattaaatatacagcttaaattctgttaactatttgatggaatcaaattaaataaccatcacatattaattcccatggaatatcctttaagttttaagctttactaggtgagtgtccgcgctacccgccggattttgttattttttttttttttttaatatatttaaaaattattattcttttctacaaatattattttataggagagtttgtattatgaaggatgaaaactatatatttcttattaagcactgtatattgtttgttaatttttactcataggtaaaagttttgagtgtgttgatgaaaccgcataatcccgtgctttcatatatatgatttaaaagatgtattcgttaaatatacagcatacataaaacctctataaattaatactcgataaactaataattgtataaattttttaatatattataaatgaaaattttggtgaaatacgactctgctatatatttttagtttacattatttctaaagttcatttttaatatttttactatattcaaaatcttttttgttgttttctatacataatatttttttattagttgtaattagttctaaaaaaataataattatacataagtatttttttaaaacataaagtatttaaaattacaaaattagcctaaaatatctataattaatttattgataaattaatacatcgataaattaataaaatttcacggttccaatattattagtttatcgagggtttactgtatctcgattctaaaaaggatagatggatagtaattgaaaattattgtttcctatcaaactgttattaaaattacatattgtctatgaaattcttcttgttttaaactatttccaattttaccaaaggaacaatggtctagtgatagtatcttttggattacatatactatctacgaaattattcacttattctttaaattggagtacctaaaatcaaactttggatactaagaaatattatgaactaaagttctggaaaccccatgaattataagatttgtttttcccattatattttactttttgtcttctaactatttttttttttttttaataaagaaatagttcaaacctatgaatgcagagactatcttttgttgtagtcctcctcactttttcgaactatgcaatgactatcttccaaatagagactttgggagattatcaggagttttgtgaacttttttggtttaaggtttgcaatctttagtttatggggatgaactactaacaagctaaacatatataacaatagatcaacaactaaaattctaatgtcatcatgcctatctacaaataatttgataaacgataatattatttagaaagagtcaacttaaaatattacgattctagaagattaacactcctctctttcccttcttctccaagcaacaacatagtcaacaaaatagtttggtcaaaactaagaaaacaaatgaaaaatcatagaaatttacatttcaacaaacacctcaaaaaacaaagatgagaaagagagtttggtagaaatgcaatatatatattattatagatagatagacaaatttgtcgatcttctagaaacacatcgtttttagatatcaataattagaagagaaaataatataatgagaacaaaggtgaagaaagatctctccgcgttgtctgaagacggcgacttattcatctctcaactataattaatattttgagagattctctttgtttcagtttgagttgacatttactcggtcccacttctcattttttccatcaaggctttactctatttttttttttcatccaatgatctatcataatctataattgtgttagtcacacttagcctttggcctagctttactttttctactcatgtaaatatcatttatatgaaaattaggttttacaacatatgttaaacatattcatatgatcctttggcaaaaaaaagttaaaaacaaagagatcaaaaaagttatgggagaaatcttggtagatgttatcgcagctaaaataccattaattttcgataattgcgtctgatttttttagagggatgatgtttttgatatctcgatcaatatactttcgtctagtacttctatgaaggtgtagtttttttaaaactcttcttcagtaatgtaatctaaaccgttttccgttgtcgtagatttctatcgtctctttggcctttggtaagataatacattaaacttttcttctatatgattttgataccgccgactgttgaaatgttttacagtagagtttagaattaattgtaaaacatttgatttagatttcctttgtataagttttgggtttttctcccttttgtttttttggcttcgtattgtgaaacatgtaataatactttgttttctttttggttggacataatctccgaaaataagcgatttatcttttagaatctattttgttgatcgccaattattgtaaattgtcactaattttttagtctatctttttagatcataagagagaagctaccatttctattttaatatccttttcttcatccgtacgtatatccacaacgacaagtagacaaaaatatgttaagtatttgtatgtatcttttttttttttctgttaagtatatgtatgtatattctttttttcttttgttaatataaaatatatcatatatgtatattctttccgaccaaactttctatctttgttagatacctgtcttttatttttgtttaatggtgtgattggagagatacaattggatagcaagtaatcaattgtataacaatttatcaagaattgttaattgttatagaaatttgttccattttaaattcatttgaatatctaataaagtataaatattcaaatgaagttgtttttgcttttagtgcaccaagtcttcaagttcttccggacctgaggaagtttccataattcaaatatttatagcgaagacacttctacatgttggggttagaaagaaaaccaacatatcatggtttagtaacatgattctgtttaaagatttaattatttatgtaattatgtggctgaactgaagcaattcatagtctatatagaacagcaagagtcgtgacacccacattaagtagtcttggtacttgcccagcacaatatcagctccaacataatttcttacaatattttatttaatttatctatgaaaccgtatttaatttttgggtttccttttttgtacatgcacataaatataatataaaatatatttatgtggatgtgaaattcagatttgtgtattaggttcttgatgaaaatttgataacgtacgcatacatcaaaatcaaaatgtgtattgaaatatactagcaaacgtatgtatttagtttaattatttcaacgggaataaagaagataatatctaattataagttgtttttttccgtgaaaaagaccctttcatgtttattctttttttttttttttgtttatagcatatatcacatctaccctctattacttctattttttccccaaaaaatattacttctaatttacatgaacttttcttttcaatcataaattagtatgattttacacgtgtataaaactatttatgtcccttcaataatgtttgagagagttgagatatgtggtcgtgactcgattggccatggacaccaatctagtctcgcattgttcatttggttatggtcttgtgattatctatggcgtttcccacaaaccttttccatcttttggaacatatttccaccggaatcttccttcttgaaataatttttcaaaagctcttatgcgtcaatcgcacgagccatcaatgaccaccaactggtccgggaattctcgacgtcttcaagcatgattccctattggcatcaaaagattttccaagttttgtaagcttctcaaagtcgaacatctctccggaaaactcattgagcctttatctttatcttccttgtattgttttagtttcagtttgtatgaactttcaccttttgagattctaatggaatgaaagtattttgcaaaaaaaaaaaaaaaaaaattatttatgtcttaaatgtctgtattgacacttcaatgggtatgaaatatcaaatgactttgttacaattcacatttcggaattttaaacatgagttatttaaaaataaggcatttgttttagaataatattcggatttaggcattttaataaatgcttttcggatttaggcactttgtccacgtgagaagacgcctctatccttggttcgttgatgtcattcttcatctttcccttttgcaacttgagaattcacagacaaagagatcgactcatactcttagatcccttctgataagttcagtatcctcttattgggctcttattggactaactcgattaaggctgagaagataatatctaattataagttttttttttcatgtttctccttttattttttttggttatagcatgtatcacctctaccctctattacttctatttttttccccgaaaaatattacctctaatttacatgaactcttttttaaatcataaattagtataactttacacgtgcataaaactatttctgtcttaaatgtctatattgacatttcaatgggtgtgaaatatcaaacgactttgttgcaattcgtatttcgggattttaaacattcctttttgggcttattgccgaaatatgcactatttctcaaatttttgagatttagcagtttcgaagtcatcttctacctatttgtattagagattgagcagtataaaaagattacttttcgtcacgtaaaatgatattcttacctttctatttactttgcgggtgtttttaaatttgaatcgcatctgacaacaagtgctaatgattgcgttgttaacacacgcgtaggcaagataaggtaagggaaatatgtggctgaaaattaaagaagcacagatggagtggatatattagtgggtatagggtgtagtgtacaattagagagacgacgaaagaacaaaccctagcttcatagtttctggagaaccaatttgaatcagtgttgagagggtggcgaagtgatgaatcggaaggtatgattccgtttttgttataagttatataacagtttagttgattaagtatgaagatctattatagttgattaagtatgaagatctattatagttgatcgcagatctagtgttgtttatcagaaatccaatcttgtttatcggaaatccagatctagtgttgttttacctgtaatccgctctagtaatctgagatccatagatttatggatttttgtttgaaatcgaaagaattactaatttttttgtatcgtcttctttaagtgagttaatattcctgttttcgtcgtagctgggaagtggaaatctacgacagaaagcaagtgggattttataatagaaaatgattgcttcgcaaggagcatttgtacatgtgctgagatgacttttactgaattacaaagttatatagcttcattgtttcactttgatgcgaagacctggaaacaaaacttgagttattggcttccaaagcagaggtcaatcttttctgcacggaaaaggcctccagtctgtttgaataacaccatggcgttgaagagcttcatgatggttaaggaaatggagccacgtttaaacttgtgcctctcctttgaggccatgcaggatgatgaaccctagaaacaacttgtttgtgagcttggggaaagttctaacaatggcaaagacgacgcaaccatccttgaaaatgtacttactgagttcagaattgttaaggataatgactgcaccaaccaactagaacttgatcttatgtaataggtaagctccaaaaggccacttattactagaactatcatagatgagcttaagtatttaagaagcgaacatgtaggctcatagaagggctcgagtttagatacttaggtgaaccaatcaaacctgatattaatgcatgtttatgattagagatttgtgggctagcgtcgtaatccttagttattaggcatagttagtaatgtggactagtgttggttgctttactttagtgatctgagttctagaacggttcgataacaatcctaatcataattaaatctactagttatctaatttttgagaatatctctagacttgacgcttttctccctctgatttacaacttgatatttaatgctttcttgtctttttatctataatctcttggtttagcttaactcgaaacctttgtctattatgtgattgcattgcaagaaaacatgtgatattccaacaaatgctttcaataatcgtattttgttaaaagtttcttaccgatatcctataaaattgcaacaaatattttatttattaaatatttattgcaaatttctaataaattttggttatgataaatttgtcacacacgccgtaggaaaattgttgaaattttccaacaaatatgatattgttgcaaattagcaataattattaaattgttggaaactattaacaaaatatttgttagaaactaatttgtttgtgggaatttatttctaacaagttaatgacaaaatatttgttggaaaattggggaaaaaataaaaacgaaaataaaaaacaattacggaaaaaaaaaaccaaaaatagaaaaaaccaaaaagaaaaaaggaaaaaattttagggtaaatatgattcatcttcttctcattttctctttttttttttgatgtgaagctttacttctgaaaaaattgaaaactgttttcaatgacaggaccaaaaaacaaaaatcgtgagtggatgtataattatatagatgaaggtattggagaattattaaaggaatttaacgaaggtcttgttgatttatgcgttttgctgcaaatcaagagattccattagagtgtggtaagatgtattatccttattctacttgtggtaatgagaattttcttcccgtagattctatttggaagcacttatatagtcgaggatttacgcctcaatattacatatggttttctcatgaggaagattttgaaactttagcaaatagtaatgaagatgatgaaaatcatgggttggaacttggagataatcatatatatgaaagttggccaactctctccatatgattgacacatcatcactttagcatttgccatgtgtctattaaataattaatgtaagcttttcaacttctaatttataggttaattatatatttattatttaatttacatattattatattttacatatttaattgtagtattactaaatttattttaatattatatgatttttcaataaaaccattttaatagttttctcatactcgaaattttttttttcgtaatccaaactcaaagtatgggtatataatagtcgtgaattacttaatgatttgagtaagttattctctgatatttatatttatattctcttaaattgatatttaaataataaatcactgagggtgaaagatacgtaaggagttccatcgtcaaattcttaggtttctagaatccaacactaccctctgttaaattggtttaagacaaacgttgtttatgaattatgtgtatgatgcattgttgagaatgttgttagaaaaaaatatttttaatactaaaaataattgcttattgcattattgaatgattagataaataaaaattatatttaaattaaacaatataagaaaatccaaaaaaactgtggcgtagcgcggatgatcacctagtaatagtaatgaagcggaagataatataactagagatccaaccggtgtaataccgatggtaacagatgcttttcacaaaacgactgaaagtggaattgaagaaccaaacttagaagcgaaaaagttttttgatatgttagatgcagcgaagaaaccgatttatgatggttgtaaagagggtcactctcgtttatcagctgcaacgcggatgatgaatataagaacagagtataacttgtcggaggattgtgttgacgcaatagctgacggtaatttgtatatttttatattttttgtatatgatatagttttgacgcaatagagaacagatggtaatttgtatattttttgcatatgatattgtttttatcaaattcagtctaaagttttctataatgacatgtttctgtgtttcaaaactgtttcgcgtgatgaggtgacaggagagctcccagatatggttacttttatggaagcaacccataagagtaagtctgatggtgtatttgtgtgcaaaaaagctgagttgatcgccaaaaaatgtcgaaacatggagcaccaaattcttagtcaaagagacaatgacgatggtaacactttggacactaaccatcttacacaagaagaaattgatgctatttactaaggggtaaaatgctgaaacttctattattttttttaattatactttatgtgttttttttttaaaaccatactttatgtgttgaatacttttttcttatgtgaattgtaacatgcaattttgaaatttcaggaagtgcaagtgaagaaaggcaaaaaatttggctatggttcaattccggtagctgatcctattgttgatgcatctccaaattatgaagaaatgtatcttgagactcaagaaaagctccggaaattggaccaagtgattgagggaatgatgctgaagtttaaagtgttgatttctggattactatgatgcaaaacaagttttcaaatgaagttccaccttccatgagagcaacaatgaacaccaatgatggtctttgaattcaattagtaatttggtttcattacgactttaagcatttaagattgtttatcaatattatgtttggatgtttaagtgttttgagattttaaaatttttaattattatgatttttaataataatatttatttttatttttattatttatttttatttttattatttatttcgtaattttaaaatatttttatattttaaaattatgtacaaatatatttcaacaaaaagttgataaatggttcatgagacattttgtttagaaacttagtagaatctacatatacatttttacagcaattttgtgaaataaatcctggagtaggaacttatttacaatggctgtcattagctttttaattattgttttttttttgcaataaattaattaacaaacaaaaacattccaaatatctttcaatcccatatatcacgcagatttctccaaaatttgaagtaaattttggtaactatttaaaacaaaaaatatttgacaaaccaaaatacaattgcaatcccttaaattgagcaaaatgtacctaaatacatttcttatcaattcactaaattttatttctccaaaatttgaactagatttcgacaactatttaaaacaaaaatttgtttgacaaactaaaatacaattgcaatcccgtaaaatatttattttaattatatatttaaattagcggtgtaccgcgggtttttttacgggacgggtttggcggaacggtttggaaggacgttacttaataacaattgtaaattataaaataaaaatattttatagataaatataatttacaaacttttatatatactgattttaaaaaaataaattgtctctgcggtgtaccgtgggttaaaatctagtatatcaacatattttcaacgattaatttctgataaaattccaacaattaaataatcataagttttccacaaatttacaagaaaaaatatcaataaatttttaacatttaaattatcattaaatttctatgaagttccaacaaataaggcgtcaaaatcctcaaaacgcgcgatatgatccatatattgttcgtgagataagtcatggaaaagatgttgtctgacaatagcaaagtaggtaggcttgagctcgtagtcgtttctctagaatgggggtggtacgatcgctgatcgattagcatagaacatgtcaagcctgttgaaatcctaagagtacgtcgtggttcacctggttgttgcacatttgcttgttggtcaactcgatttgatccgtcaagaagttgagggtgtcgatcgacacccatctggtatcgcttgacacctacgtctacgttgcgagcaacgagttgcgcgttgagttgcacctgctccattatctgatcctcatcatggatgattatgtgatcatctagtctctgtccagtgacattataggcttgtccatcatcatctctcaaaactcattcttcattagctctgatttgtccgttaaccttagatgttaatctctgagctttgtggttggtgcattttagttatctcaaatcaagtgttgataggttgattaggtccttatcttatgttattcgagttgtaagtctagacatgcacctgaaacacaagagagagagaagaaacaaaaaacgcgttggtatcgaaagaaagaaaatttagacaaaaactctaaacaaaacctaatggtcattcccaagaacttctgcaacggcgccaaatttgatgtcagtcaaattaacctcaagcactctctcaaataaaagatctattgcagtattttatggtcgaatttcacaaagttcttttgttcacacagaaggttgtagtctcaaaattaagctaaatcaataggtattagaaagtaaaagaaaacaagaaagcaagcagcatgtttaattgatgtaaattcaaatgattaaagcttcggttttagggatattatcaggaaataaatgactaatagatctagctatgattaagattgttctcaaaccgttctaaaactcaaataactaatgtctggtcgaccaactctcgtttcatcaactaactatacctattaactagggatcccaaccctagttgtaaatcactagtccctaaacatgcactaagatcaggtttgatagttcacttaagtataaaaatcagacctatccatatttaaatactaaagcccatctatgatatagttcaggtaataggtgccttctcgaatgctacctattacccttagatcaagttctagttagttactctagaactaccattaaaaacaaatcaagatgaagaactctaaaaataatcctaacatgttatcgatctatatcatctaaatccctaaggagaaactctaaacccaacaagtagattgtttagacatgatcatagaaataaaaacatgtttgaataagactgcataaagaaatcaaaagaagaatagagtttagaaaatatcttttctctacagggttttgaaatctctgatgaactctccaaagcaaaagtaaaacttagaatatggtttttaaacatgtctaaaggtttggtcttaacaatgaccttaaaaatctatatataagttcctaaaaacatttagagactaataatgcaaacaaagaaattttctggggtaacttctcgagacttcaaaactccatagcgttagacttcttattgggtcgcgaatggtgtagatcgacatcaggagggtgtctgtcaacactcttgccttggtcaagatccaaattcgtcattcaagcttgatttccttggtttggtttctgaatactccataaactctcaatgcatccctaaagtgcaaaaacctgaaagtgactagaaaagactctaacacctatacctatatcatacctctaattggtagattattctaaataacttcataaaaataattttgttgtaaaatttacaaaagggttagtaaaaagggtctattagtgcgtgaatgatagttttgtagattggatatatcttggtgaaagactatgtcaatatgaacaaagtagagatcatatatatgcagtatgaccagggatgttaaaacgggcttgaagcccgcgaccctaaacgggtactgggtaacatttttaacccaaaaccgtttatttaatctattattttacgggcttttaaaatacgggcccatttatgcttataacaaaacaggtttaagcaaaaatacaaacgggtagcccatttaattagttttgctccactaaacaaaactagtcgtttaaggttaggtacgacatacacaacacatgaccatgatctcgatttcttgaagttgtgaaagtgaaattattcaagaaataatttcatcaatcaatttaggaactattgcatgaacccataagcgatttggattggtttgtctctcttcgatttttcaattttttctttgattgaaaatttgatatatatatatatatatatatatattgagattatatctgttgtttaatggcttagggcattcggtcgtgacggagagagatctcaaaagttttcatttgtaacttgtaaggttagattctaaacttaaaatgatgaactttagattctctttatcccacttctattgtgtatttcacaaaagtatggagaattgagctatgagaacagtttttggtcctagaattgttggagtaagcttgaagataatgacttaagttataagttatttaaatataggaatagattaaatcttaaggagatatcttaggagttaagttaggagttatctaaccctaatcctattgttatttggttttaaatctctatatatatgagtcccaaagttgtggtgaaccatatgagttttagagagattaagactttgaaattgtttaggtttgagttatttcctaagcttaataagagagtaattcttatatatctttgagttcttaatcttctttgaaactagatttggtatcagagcatccaggttttcgatcaaagcaaaggattgaaaacatgagtgagattattgcagtaaacaacaaatcaaaagatggaggaggatcatcgtctattcaatgtccgatgttgaataacacaaactatacggtatggtgtatgaggatggaggctgcactacgagtgcataaagtctggggaacaatcgatcctggattagaggacgaagagaaaaacgacctagccgagcccttctcttccaatctattccggagtcacttattcttcaagtcggaaaactgaagacttcaaaggcagtatgggataagattcaatctaggaatcttggagcagaacgagtcaaagaagcaaagctaaaaactcttatggcagagtttgacaaactcaagatgaaggacaatgaaactattgatgaatgtgcagggagactttcagaaatttcaacaaaatcaacatctttgggagaagatattgaagaaacaaaagttgttaagaaatttttgaaaagcctaccaacaaagaagtatattcatatagttgcagcccttgagcaagttctagacctcaagaacacaacattcaaagacatagtagggagaataaagacctatgaggacaaagtatgggatgacgatgattaactagaagaccaaggtaaattaatgtatgtagatttgggttctcattacatgtctcaagaaggaggcagaggaagaggaaaaatccgtggtcggggtagaggcagaggaagagttggttataagcagagagatcactctaaggttacttgttatcgctgtgataaattatgcctctaattgtccagaccgactattgaagttaatcaagctccaagaaaggcaacaagaggctgaagacgatgatgatgatgaagtggagtctcttatgatgcatgaagtagtgtatctcaacgagggaaacatgaatctagagatttatgaagcatgttctgacaaagcttggtatttagacaatggtgctagtaatcatatgactgggaatcgtgattggttttgcaaactcgatgagatggtcactggaaaggttaagttcggagatgattcacgaattgacataagaggcaaaggatcgatattgtttttgaccaaaaatggagagccaaagacactagcaaatgtctattacatacccgatctcaaaagcaacatcataagcttgggacaagctactgaggctggctgcgacgtgagactaaaggacaactacctgacattacatgatcgtgatggtaacctgttggtgaaagcaacaagatcgaggaacagactgtacagagtggagctaaaagtcaaaaacactaaatgtttacaacttgcagcacttaacgacttaacaaagtggcatgctcgattaggtcacattaatcttgagaccataaaggcaatggtaacaaaagaatttgtgattggaatacctagtgccccaaaggagaaggagatctgtgcttcatgtatgcttgggaagcaagcaagacaagtttttccgaaagctactacttatcgtgcttctcagattctagaactcatccatggagacttgtgtggacccatttcaccacctacagctgcaaagagaaggtacatactagttctaattgatgatcactcacgcttcatgtggtcatttcttttaaaggagaagagtgaagcattcggaaaattcaagacttttaaagcaacagttgagcaagaaaccggagaaaaaatcaaaacactcagaacagatagaggaggcgagttcctatctcaagaatttcagacattttgcgaagaagaaggaatcattaggcacctcaccgcgccttacactcctcagcaaaatggagtagttgagagacgaaacagaaccttgttgggaatgactagaagcatcatgaaacacatgagtgttccaaattacttgtggggagaagcgataagacatgcaacatatctcattaacagagtgggaacaagagctcttatcaaccaaacgccctatgaagctctcaagaaaaagaagccaaatgttgaacacttacgcgtgtttggttgtgtgagttatgccaaagttgaattcccacacctaagaaagcttgatgagaggtcgaggattctagtctatctcggaacagaaaccggctccaaggcttatacattactagatccaaccacgcggaaaatcatagtaagcagggatgtagtgtttgatgagaataaaagctggaagtgggctaactctgaattgattgaaattcagaaagaaccaggaatgtttactcttgctcaaacagagtttcacaataacgaagaagttgagaacgaaacctcagaagaaatagaagaaaatgaagcagaggactcaactaataaagacgcagaagacggtcttgatgaaccaagtgttcctgaacccaatcacagcgatgatgtaccagtctttacacgctcaggaagacaggtcataaaaccggcacacttaaatgattatgtgttgttggctgaaattgagggtgaacgacttctgcttctgattaatgatgaaccctgggattttaaggaagcaaataaatacagagaatggcgtgatgcgtgtgatgaagagatcaagtcaataataaaaaacagaacatggagcttagtctctctacccgtcggtatcaaaccaatagggctgaagtgggtgttcaagataaagagaaactctgatgggaacataactaaacacaaagcaagactcgttgcaaagggttatgtgcaaaaacatgttgtagactttgatgaagtgttcgctccagtggctcgcattgagacagttcgattcatcatcgctcttgctgcatctaatgggtgggaagtgcatcatctagacgtcaagactgcattcctacatggcgaattaaaggagaatgtttatgtcacccaaccggagggctttgttacaaagggaagtgaagagaaggtctacaagctgcataaggctctctatggtttgcgccaagctccacgtgcatggaacattaagctcaatgagattctttagaagttgttattcgaaaggtgctctaaagaaccttctctgtatcggaaacaagagggtaagcatcttcttatagttgcagtctatgtggatgatctacttgtcacaggttctagtccaaaactgatagatgacttcaagaaaggaatgtcaaagaacttcgaaatgagcgatttgggaaggctcacatattatcttggcattgaggtcacacaagaagaagacgggatcatcttaaaacaagaaagatatgctaaaaagatccttgaagaagctggaattaatgagtgtaaatcaattcttgttcctatgaattctggtctagaactatcaaaagcacttgatgagaagagcattgatggacaacaatatcggagaagtattggttgcctaaggtacttactacacacaaggccagatctctcttactccgttggtgtcttaagcaggtatatgcaagatcccagagaatctcacggagccgccttgaagcaagtcctgaggtaccttcagggaactacgggttacggtcttgtatttaagaaaggcgataagactggattagttggttacagtgacgctagccatagtgtagacgcggacgatggtaagagtaccggagggcatgtgttttacctaaatgagtgtcctattagttggtgctcacagaaacaacaagttgtagctctctcatcttgtgaagccgagtttatggcagctacagaggcagccaagtaagccatttggcttcaagacctgcttgctgaagttattggaacaccatgtgagagagttacattacgagttgacaacaaatccgcgattgcactcacaaagaacccagttttccatggaagaagcaagcacattcatcgcaagtatcatttcataagagagtgtgtagagaatggtcaagtctcggtagaacatgttcccggagtcaagcaaagagcgaatatactaaccaaggcactcgcgaagatcaagttcaaggatatgagagatctcattggagttcaagacttgtcaaatgaagacttcaagcttaaaagagtgaatgttggagtaagcttgaagataatgacttaagttataagttatttatatataggattagattaaatcttaaggagatatcttaggagttaagttaggagttatctaaccctaatcctattgttatttggttttaaatctctatatatatgagtcccaaagttgtggtgaaccatatgagttttagagtgattaagactttgagattgtttaggtttgagttatttcctaagctcaataagagagtaattcttatatatctttgagttcttaatcttctttgaaactagaaggatgaaattgggaatgcttgaaaaggattatggaaaaaataatccatcaacttctaagttgaaaaaagagagcttagagagatactggtaatgctctacacagattatcaagctaagtcgcgaacacgttctttaggtgtcacaacaactccaactccatatgacttagtttctgagtctccacttgatgatgatttcgataatgtaggtactactctctttactatactataattttataagcaatattttgttataactaacttgatgtgaatcttcaggatctctttgaacttgaaaaaagtatcggagttggtgtgagaagcacaaagacacatttgggtatttatttagatgagccaaaattagagatgaagtatttttcgatttggatattttgagctattggaaaaaaccatcatacacttggttatttagcatctatatggtacgagaagtgctgggtatccccatcactaccgtagcttcggaatctgcgttcactctttgatctcgagtgttgactccatatagaaaccgactacttccaaggaatgtacaagctctagtttgcactcgtaattggttacgaggatctgaagatcataaagataatactctgttttaactaattatataattaagtgaatttttaactaataatgaaatctttaaattgtaggtaccatcgaagtcaacgatgaaattggtaatgaagatggtagaaatgtagggagtacttcagcagtggagggttcaaggtacagagattcaagcgttcggtcaaacaatgatgatttggaaatctagacgtaatgttttatattttgttattcatgatttggaaatcactcttaaatgttttggtcttttggacgtgatagtttcatactttcatttttcacgtatgtttcatatttttttttgttttcttgataatacttttaatatcttagagatgtattatattttggacttaatcaattctcaaatgcttcatatttcagttatcaattctaaaacaaaattaaatctcaaaatatggtcaaaagaaaaaatcaggtaaaacttttttcagatgggcctaaacgggcttttaaaagtttgacaggcttaaacgggtataaagtaaacgggcttcaaaaaagttgttaaacggttgcggacctaaacgggtccgtgccttaacgggccgggtagcccatattaacaatactacgtattaaacaaaataaaagtatagaaaaccaactcaagaacctattacaatgatttgaatattggaaattagtgttatttagaattcttgttattataaagtttatttcaaaacatactttggcaattttgaaacaaaattataccaaaattataatggtatattttttgggttcaactataatgaaggtttttttttacggctatacaaagatgtcccaccaccctattctgatgcacatagtcatctaataaatctaataaggagattgactgaaacttgggaagaaccatcgagcatcagagaaatcattggaggaggaaacacaatatggcaaaggttcactctcttgggttgtaagatcaaagataaatatatggtctagatgttttctaccataatcaaacccactaatataaattgagtttctcttgagcccggggatgtctttggcaacaatagtaatacccatatctaagatcaatgcctcatcgcccaaagactcgattctttcccaacgacgcttgatatagttcatcttgtagatgcgaaagagccatcttttggacttttgcactacactagctaccttcaagagttctccagatgttgttagtgcaatgtttagcctcgtgtcaatatactctttcacatataactcttcgtcagttcttctatccggaaggaagtcttgaaaaacaaagtcaaatggaatataattttcaaaaacaccatgtggatcctctctagacaaacgccaaatacttaaagtagaatcattaaaatgtacgtaaagtttttgagtcttgtgttcgtaaacaatttgttctacggatagttcttcgttcatagagaaaacttgttgccacgtgtgattccctttcttggcgtagactaaagagttttttatcttccacacaactatataatcttttgttttctcgtctatccaaagacatgctacactagattccaaccttggtagatcaaactttgtacgtggtagatcaatcttctcaccggttaagggattcaaaatgttgagattacagagacgatccatcattaggatccaactaccgtaagtagctagacaattactcagcataaagccaacaccaagatctttggttttgtaaagactatctctatcatctggaacaaacaacacacaactattgttgttgttgttattgacgttgtttcgagggaataaaattagccatggaatctgattttgtgttgggacgcagtgtctcgaagcagagtgccacgatgaacaaactgatctagttcgattaagatccgagaaactcaatagttcgaaaacacatcgcaacacgtctggacaaagctctgaccaactagctttcttatttgtttcgatcattgatcagaaatgtttttgaaattttgttggacataaagagacacacaaaagaggtgtttatgtttacaattttgttgaaatcattgggattgcatatttatagagccaaagcaagttatagttaaaatcttaaacatcaatatataaattaatcaattgaataatgagtgattgtatattatttagatttattttgtataaattctatgttcaataaccattatatttgggtatgatttaatgtataacaagtttggtatatatatatcatataagtcatactttgaaaagggttactaaatttaatagttataattattttttaagtttaatgattagttaataatgattgatatataaattaaaaatttaatgtatgtttattttaataacacatgttcaaaatgaaagtaatatatttatgcataaagcaatgtactcctcttattttatgtttttgacatcaaaaggtaatcattttagataatgttatgttttgtaaaactataagtgattgttgaacatagaaaattgggtatatagatggagtaacacatttaatagtgtttaatggattggataacagaatggaaaatagttttaagatgacacatgtgcatgctaattttgagatttattcgacaaccaaaggtctttattttcatgatgaaaaaactatatggtcacaacaggtaattttagaggaaacattctagagaaaaaaacaattctacctctacatgcattggttagagaaataaaataagaaaattatcaaagaaaattttctccactaaatagcgaagaaaaaattgaaaattaatttcttctatttattttactaattttattttaccttaattttttttagacaactatttgtaccataagattactaaggttatgattggtgaaacttgagcttaaaagtgttagaataatgtagattaattaagaatgaagaaaaataaaaggtttagagtaatgagagtaaaagaaataaattaatttattttattgtaatttactctcagttcatgtacacaaagaaggaagacttttcatctttggacaatattatataagacaaaacactttttggacaatatattttaatatggattgaatttattttcctttcattttcacatgcttggaagaaaactaagataaatgaactaaaacaacttttctctttcatttttaatctaacaagattttttagtcacagcttaaaatatattggcaataagtaaaaaagattctaagtattttttttactgaaatttgctctgactctaattttaacaaaaataactaaaatgactcctcttggcaatggttaactagaatgactccaattttaagtaaaaagacctgttgaccttaatcaaccttaataccatattttaagaagaaaaaaaacgaattatgaattaaaaaattaaaaaatatcaatgaagaagatcccgaaaaaactggatcttgttaatattaaaaattataaatttagaatataaattgaaaaatataaattaagattatatttaaaattataaattaagaatataaaatcacaaaaggacgcgcaatcaaaagatcgtgtaaaataaggaaaaatcgaaaattttgattttaaaagaatatactctttattgtcaatttaatgcattaaacatcaaatatggaaataaattaaacaaatctactgtaagcaattataagtctgtcgtaaaccaatgtaatcaaaccggtttacccatgctctcaaaccgagaaacatttttagttgatcaacattttggttttacttgggactagatgataagaatataataacgagatgtttcaaattttgaaaaacaaatctatcaacaaaaagtctatcatcacttaaaagattattctagtaataaacatatcttgcataacattacatgattaaatctattatgcttaggatcagaaaaacaaaactgtcattagtaaaaacaaatctgttgtcactatgatattgtctagtaatttattttttaaaagaaaatctgctgtaaaacgacggatttaccaacaagataataaaatctgtcattacatataacaactctgtcataattaaatttctttttcttttgttgaataaaatgtggcaacacgagagttttaattgtgaaataataaatctgttaccaaaacagaaaaactctcctattttctaaacaaatatgtcacagacttttttatatatctataaattttaataattatttaaaagtctgtagagtctaccgaaaacaaatctgtcgcgaaaaaataatttgtgaaaatccaaaaatctgtaataactaaaactaaataattatgtggtataaaaaagtctgcctaacaaaaattatggtggatcaacaaatctgtcgtacacaataaatccgacacaacaggatgcacagatttatcaaactcgaccaaaataccggagtggcagtttcgtaaataaaattgattttttgccatgctagaattaaatagtaatggcattcgtgtaatattatttttccttacaaaacaaataaaggacattttagaccaaaatattactcatataactcatatttttagtatatcattttagtaattaaacctaaaatatgggtttccctagtaaatttcctttttttaagttacgttgttaaattgtattaaaagcttcacataaataggtcaaatatctaagtaggtcaaacagtataagtggtaaatcaattctttcaccggtaaaatgatttaaaatattagaattttagacgatccattcttaaggacaaatcgtgagataatctatactagatcgaaccttagtgtcaaatttctatcaaagtaaaaccttggtaaatcaaactctataaatgatatatcaattctctcgctatctaaatgattaaaaatattgagattacagacggtccatcgttagaagctagctaccataagtagttagacaactactacgtgaaacacatcgaagcacgtcttgacaaagctctgaataattagcttccttttttattttgctcaataatcatttgttttcacaattttgttggaaagaaagagagccgcaaaaccattgttgtttttaatttttttgatgaaatatacaatatttataaagccaaagcaaattccaatcttttaaaagtaattcttaaacttaaatatataatttaaccattgaatgattacattttttccaatgatttcatatatatatatttttgggaaggtaactaaacttaatagttatagttattttgtaagtttgattattagttaatgatgattgatgaataagtaattttaatgacacatgtttaaattaaaattacatatttataccatgaaaaaggtactcttctgttaacaaagaaaatgtactcttatggttttgacatcaatagataaattttctctttgtcccaaactttacatggtaaactatatagaatttttaaacataaaaatataggagatattgatggaataacacatttatgatgtttaattgatttgatacgaaaagcgacaatatgcaaatatcattttcactaagaggaaacattatagagaaacgaaacaatattttccactcgtacatggctaatagaaaatccaactactaagtccatatgcttggtacatagttgcgtaattgtatacatacatttaataatgaacgtagttaataccaattagtctctatactgttgggtacaaaattatatctaattttttttgtcaaagattcaaaaaagtccttattattattgcacaagagatgtttcatggactgcggacgaactcatattacaaagaaaagtatatgacaattaaaacagacatgagtaaagcttatttttttttttttttttgaaagaatgtaaaattatattcaaccaaaaaaagactgtttttacaatgaatgcttcatgagtttagagaaattcaaaattgtcaaagagattgaaaacgagatcttcctagcatagttttatcagtgaacttagcaagtttcgcagcagggatagcagtttccccgtgtcgcctgcagttacgttctctccaaagactatggatcgaagcttggaaggcatagcgaagagtgaagacgtgtagatatggtctagacgaatcaagaagatgtggggtgatgagattccaattcaagatgttcctgccattaaggagaccttttgttaaagagaaccaaacgtgagaggagtagggacacgagaagaagaggtggtccctcgtctccaactcctcaccacagaacacacaatcataccgagcccctgagttccatttgcagattttgtcactcgtcgtaagccgattgtgaaacgcaagccaagtgacaaaagagtatttcggggtagaggcagaaaaccagacccctcgataccaatcgcaacgtaggcttatggatctaatttgttgccaagtttttgatgaggagaaagaactcttgaaggtatcttccttttgtttccaaagtgagcgatcgccatctgtgcttctatcttgtctagccagctcaatttggctcttaatttgatttagaaaatctgctctgtgacgctttcttctatgagtattcatcacctcagcaactgtcgcattatttggaattcccaaatctattgttccccgagaccccatgtgttgatgcagtctaccaagcggacaccaatgatcatgccaaaacgaagtgaaagttcctgaacggacctccattcggtgaaacaaacgagctttatctctctgttttagaatttttctccacagccaggaacctaaccccgtgttctccttgacagaccaaaacgtttctttgcgtatcaaatgtttgttaacccattttacccacagagagtccctagccgacaatattctccaaatgagtttcagcaaactaacttcattcgcctcctttagtggctttagtcccaagcctccttcctccttcagcttacacacctccgaccaagcaatttttgctttcttagtatttagatctggcccagaccacagaaaagctgaaaacatcttctctatctcctgaagacaagcttttggtaaccgaaaaacagagagccaaaagtttgtaatactagatagaactgacttgatcaattgtaatctacccgcaaaagacaaaaaccggttggtccaggaggttattcgtgctcttatcttctccacgagagggagataatccgactgcgtcattctcttggtgagtaatggcaaaccgagatatttaaccggtaaggtacctaactcaaagggaaattgttgaagaattgaagttttggcattaggagatatccctgccatgaagattgttgatttctctagactaatctttaaccatgacatggcagcaaacttctcaaaaattgcaagagttccctgtatggatttagaagtaccatctgagaacaccattatatcatcagcgaaacacaaatgtgtgagattcatgttacgacagcggggatgatagctaatctttttttccacagcagccttatcaagcatacaagagaggacattcatacagatgacgtagagatacggtgataaagaacagccctgtcgaagacccctttcactacggaaaaatcctgaaagttccccatttacttgtaccgaaaaagaagcagtaccaatgcaaagctcaatccaatgaataaacatttccggtaagtgaatagccttgagaacgttgatcagaaaaggccactgcacaaagtcaaaagctttcgatatatcaatcttaagagcactcctactagagattgattccttatggtagtcttttactagttcagaagctaacaacagattctccatcatcaagcggtctttaatgaaagcagattggtttggtgcaatagatgcagggagaatttctttgagccggttagccataagctttgagactatcttgtataaaacgttgcagcaagaaatagggcgataatctttcattccactcacttcatgcttcttggatattaaagctagaatcgtggtgtttattccttttggcaagaaccccttcaagaagaaagactgaatagctataaccaagtctcttcccaaaaccggccacgcagtcttgaaaaattcaactgtatagccatctggacccggagatttatgctgcggcatagagaataacaccttcttgatttcatcctcagtgacttctcattagtttttcatgatccacggtggagcttcgataggttaatatattttggatttcagcgacacttgaaccctcgaaatcctctggcttagcctgtaggaaggatttaaaaaaccgcactgcttcctccttgatatcatcatgactcgtgcacactctaccatctgtacactgaatttcacggattgagttcatggctactctggcctttacactattgtggaaatacttgttgttcttgtccccaacatctaaccaatgcaacttagacttttgctgcaaataaccttcctccaaatctgccagagagttccaatgagtatgagcttgagtttcttctgcaattgcttgagaggaagctgtttccagagttttttgctacttctcacataaggatgtgtaagcttcagccactcttacagacagattatggagtgtacttcgaccaagtgactttaaaataggcttgagaccctttagctttttggaaaaacgaaacattgcagaggtaggatgaaaaagtgcaagtgtaccatcccaaaaatctttcacaatttgcagaaattcaggcaatgtagtaagaacattgttaaacttgaagggaccttttggttgtgtatttccactagcaaactttattcgacaccgcagatgatccgaaatccctcctgcttcaaaaatactataaaccgcaggaaatttgcgagtccatacttcatttactagaaccctatccaattttttattgactaaaccctcctctcttttattgcaccacgtaaacactggcccgtgataactcatatcagctagggaacaatatcttacgacgtcttgaaagtctcgcatgccctgtggaatgaatggtgaattcacaaaatttgaatgatcctccccatccaaaatttcattaaaatcacccagtatcatccaacctttattacgaaacattggcaaatcgtaatgattcctcaaatcttcccaaagttctctccgttcatccacataattcgatgcataaataaaagagacaaaaaaatcctctgcattttcttccgtcaaaacagagcaagtaatcaattgtccacttttgtaaaccggagtaactcgaaccgtattcttccaaaccacccaaattcttcctaaacgatgatgttcatagtttgtcatagaggaccagtctcgaaagaccttagatatgatacgactggctctgttttcatccactctcgtttctattaaacccccaaaagttaaagaatcctgtctgacccaatcatgaattacagaatgtttaattgttttgttgaatccgcgcacattccagaaaaaaccaatcatttaatgaagttttttggagtttcttctgctcgaattgcttgagacattgtctcttgctttttgagtaaaagtctccgacagtactttatgggagctcttcgaggaacgagggagattgactctcagcgcccctgttttctccgtctccggtgccgagttcttcagagcccccacgttggaatccaaaacttccacctgttccccacgctctgtctcttctttgtccccattctcctcatgatcactcaaaacagagtatcgagaagaggataaaagcgttacttggccgaactctaaaggttttccatttgatttttcagaacttttacttcctttccctggagagactaaggaccaaccatctccgtctgactgagtgacttgtggtatcaccttgtcggagacctcctgattttcaacgacctcagaaagttgcaaagttgagttctgtatctcaacatttgtattcactttgctaactatcacattgtcagacacaaccgctagaacttcaccttcttctaattccatgactctctccttcaatggagacttcggcttactcacacaaacatccacgagatgaccccatttattacaacaagagcatttaggaggcaaccaaggataaacgaactccacattaacatcttcttcatcctctatactgaacctgaaacactttggaacctcttgcgaaagattaacttcaacaaatacttttgcttcatcaaacttagtgcataactctgtttcaggatgaagtctaattggatttcccactggactggtaagaaagcttaaaccattccaggagaacatggaatggggaacattttttactgtaacccacaatggcatagttttagacatgagtaaagcttatggtcgaatagagtggctttttattgaacatttactaaagaaaattggtttttgcgataaatagttttttttggataatgtaaagtgtcacatcggttcgatataagattctaactaatggacagcctcgaaagtttgatagtctctgaaagaggcttaaggcaaagagatcgttatcaccttatttatttataatgtacagaagtttttgttgccaatattcggaaagcaaaaagaaaaaaaacttttacaggaatgaaagtaacacaagcaagtctctagatctctcactaattattctcggatgatagctttttcttttacagaatgacaaaaaagagcagtgcgctgtcgttttaggaatattaaaaaggtatgaagaggttttggccaacgaataaattttacaaaatcatcggttcaattcggacacaagaaagaagattcactgaaagacgaacttatgagaactctagagatcactaatttagggggcatgggctcttatttaggattactgaaaagcctaggaggctccaaaactaagatatcttcttttgtgagagagcgctaacaagaaagaattaatcgttcggcaaaattcttatctagagggggtaaagaagtaatgattaaatcggtagctgctgcgttgcctacttatgtaatgtattattttagattaccaaagttggtaacgtcaaaacttacgaatgtagtagcaaaactttggttgagctcaactggagaaacaaaagaaatgcaatggatggcatggaagaagttatgcgagagaaaatctaatagtgggattggttttcaggatgtggatgatataatactgggttattagcgaaataaatatggcggtttattaaggttcatgattccttatttgcaaaggtttttgaagggagctattatcaaaaaccagatccaatggatctgctcaacctctggttaacaaagggcttattaaacgaataagctctggatgatcaaattcagtatggaatgatccctggataccagcttaatccccgaggccagctataaacaatggttatattcattagcatatcttcttgtcaagaatttgattgatgatcagacaaacacttgaaatatagatttaattcagaatattcttgatcccaaggatatcccttttgtatttgcactacccataagaaaaaataacaaacctgattttttggattggcacttcacgaagtctgaaaaatatacgatcgaatcaggatattatacggagcaaatgacgataggtgaaaaccaagtttgttattttggcccaaattttacggcctctccaagcccactcttggaaagtccaatgcccgctaaaattgagacattttatttggcatgttattactggttgtgtgcctgttaattcttctataatactatctacagtgcacgtgttgaattatttattcaactgttgaatctccacattgcacctgttgaataattaaaaaaacttacgtgaattcaacatgtttataaattttggacccacatgtgccacttgttagtaagtgagtgggaggtgtgcttcaaactcagaaacgaagggtgtactgtacaaaacttttttttcattttttttcgaagagtgccacttgttattgagatgctgacacttgctatattttcttggagatttttatttcatcttatctttttacaatcaattattacatacaaaagtttttttttaaaaatatatacttatataaaaatttatgacttctatatatacatttttgcagccattttaacaaataaatcctataactggacttatttacaacccaatgccattagcattaattttttttccaaaataattaattttactttaaattcttaatttaaattgtcaattacattatcaatcaaatttaatccaaacaaacttcacattaatcccttaaaattagcataaacgtatttgttagcaatattttaaaacaaagttttttgtttaaataaatattattcttactaaacgtttttttgtctaaataaataaaccctgtatttgaacttatttacaatgtcatgctattggcattaattatttagaaattaaaatatttaattaacgatttaaatcttctaaatctttgcttttagagttattatgtcattacctaaaaggcaaaaaatatatatatttttaaatattattatttatatatttaaactttataaaacattattaatatttaaacaaaaagtttaatatatcaaaaaatttaacatcattatataatatatagtttaaaaaatctcaaaaaaaaatccgtcatattttgtgattcaaaattttaaaaatgaacatatattaaccaattagcgaaaaatgtgtgggttcaacatcccgcatcgactaaaatatttagacaatgattcataaataagatcaacattaataaaataaatgttttttttgcaggatgggttttgcgggacgggtttggcaggacgttacttaataacagttgtaaactataaaataaaaatattttatagatagatacaatttacaaatttttatatatatactatctttaaaaaataaattgtccccgcggtgtaccgcgggttaaaatctagtttaaactctataaatggaggcttggttcaatttatttggacacataaaaaaatgtcatttctaccataattttcttattcttctgccataaattctatatattattctaccataatgtcatttttaattaatttaatttagttttaatagatattttaacttaatttgtttaacaactattattatgcatcacgaaatataagatataagaaaataagaataaaagaaatagtggggttgggtgttgaattttattaataaaaaacattggagtgataaaaaattaaagtaaggaagaaagaggaaatgatgtgaaatgttcaaaattgaggtggaggtgctgaatatgtttttgcattgtacatagttttaagcatttaactattgaattaatattttcaataagtcattgtagatagtcatagagaaaacaattaatcaatactatttttgaatgcccaccagcactctaaacttgcacattatcacaaataccaacggtcccaggaattttccaatcttcatcggtctatgtaaacatagatcatttattttggagaacacatttatattattttatttttagcttttcttggattatgtgatacatatggaaagcacaaaatgaaaaacttcacgaaaatatggatcgagatccaagggatattctcaaactagcgaaaaacaaagacaatgcttggacgttagcctgattggaggttgcaaatgaaattcaagcctcagtggcagttaagtcggttaatataaatctttcaggatatcattgtttcattgatgactcttggaaagatagtgacaagtttttgggcatgggatggttctgtattttaccaaatgaaggacatccaaccatgtgtgctggaagcactcgtctgggcaatgaaatgtatgattggccaagaaaagcgaaaagtaacgctttttataaactgtagatctgatgaagatgatgtattttccaacaaaatggccaacattcgctacatacttaaagacgattcaggaagatagtgatgagtttgatttttttgatttatctctaatgcttcgaaatgtaaatgttaaaacagaccactagatacggaatgttcggatataaccacatatgattatctttgtaaacaatactttttagcattgatttattatttgagttaatctaataaagttgtcggaaaaaacggaaaagtgagaagagaaaaagtcgaaaattcagaaacggtttaaagttaaccaggattccggtttttataacagaaccgatcggttttgtaattgagacgaaaacttctgatatcacttaaaaacttcacagaaacaacacctcgatctcatcgaagctcctctctcttacatatcatcacttcacatcaaccaaacctacttctgtctctctctctcgctctctatctctcacgctctcacaggtttttttctctctctgtctctctcttgttctccatttgcgtctctgtttgtttgatgagtttctgaatgttaaatgcagatgtgttttggttttctgtggaagtttttatatctctgttgattgagtttttctctgatgttgttgggctccaaaaaattcgaaacttgtattatctctcgtttaggtttcgtgttctctgcattgatctgcttctttaatttgttaactatactcacgtatgtgaaaaatctgaactttgtttgttaactctaatccaaatcattagaaaaatgcagattgagatttctctaatgcagtgcttgaaattttggaaactagggttcttgttataatgtttcaagtagtgaacttatgtcaacttgtgctttaggtttgatctgattcttaaattttgtttcatatgtggtctttcttacaatgtttctggatttgttgttttagtagaagaaaaaattagaaaggttgtgagaatggcggctacagcagcttcaagcttacaaattgctacacgaaggccgagcatgtcttcgcctagcaaaattcttaaagcaggaacctacattgttggtgccaatcctggaaacgcttcatgggataaactttcatgcactcgccaattatcaaaccttggatgtttgagaaaccacagtgctgttccaacttgtaagagacccttttctttttccacaagggcaatgtctgaatccagtgaaaacaaggctccttcagggcttccaattgatttgagaggttggttggcatatctttctttgaattcagagaagacttggtgctatctgaactaagcaagtgtaaatggtacagggaaaagagctttcattgctggtatagctgatgataatggctatggttgggccatagcaaaatctcttgctgctgctggagctgaaatattggttgggacttgggttcctgtaagtcatttttggttcagctgcttttagtttccttcattgctaaattatactaacctatgaatggatggtctactaggcacttaatatatttgagacaagcttgagacgtggaaaattcgaccagtcacgagtgtaaggacttacaacatgatcttgtctggttttatgtaatgggacattaatttttccatccatgtatattcaggttgcctgacgggtcattgatggagattaagaaggtttatgctttggatgctgtgtttgacaatcctgaagatgtgcctgaagatgtgaaaacgaataagcgatatgcaggatcgtcaaactggaccgtacaggtatagattagagatacacaaacacgcctgcaagttaacatgtgttactccttaatgctttttgttgcttaaatcaggaagctgctgaatgtgtgaaaaaagattttggaagcattgacattcttgtccattcccttgcaaatggcccagaggtagagaactcgtatcgattattggttacagtaagtgcattgtgttgtatacaaactatttcctaatggtgttcacatgtgggtttaggttagcaaacctcttctggagacatcaaggaaaggctatctcgctgctatctctgcttcgagttactcctttgtttccttgctgaggcattttctgccaattatgaacccaggcatgtaacaaatttcgtatgtctctttattccttgtaaatatgttttcttatttggttctctatgatgatttaggaggtgcttcaatatctcttacttacattgcctctgaaagaatcattcctgggtaaggatggcttcttcacaagttattcaaaggaacaaactaatgcacacacataacgatgtcaacacattctcacaagtatctctttcattctgtgcaggtatggtggaggtatgagttctgccaaagctgcactagagagtgacacacgggtgagtttacaattctgtttcgtaaactcaaagatgtatcggttagaagtctcttagtccaaactgtgttttcaacataggtgcttgcatatgaagctggaaggaaatcaaacattagggtcaacaccatctctgcgggtaatccatctttccctcttacacgcctcgtggtacaaataacacgcctcgtcttttgaaattataaaagagtactactgtttgggtttcaggtcctttgggaagccgagcagcaaaagccattgggttcatagacaccatgattgagtattcctacaataatgggcctattcagaaaacactgaccgcaggttcatttccttcaaaccatcacctctcttgtgcttgttttttcttggaatcttacgctttataaatggcgatgatgtagatgaagttgggaatgcagcagccttcttggcatctccattggcctctgccataaccggtgcaaccatatatgtggacaatggtttgaatgcaatgggcgttgcactggacagcccggtgttcaaagaccttaacagcaagaattagagtcttgatcgacgactggactcgagaaattccgtgttttcgtgagcttgcttgtttctttatgagttagtatgtacggcatatgttccccatcggctgtctttttttttctttctttaagagaataaattatggttctaggttgggtcatttagcaactatatatgtagtgatggattattattcctcttatgattgaaaatttgcaagtgagaaaaactatcatgtttcttgtaagttgtctcctccagtctcaaatctcaaaccaatttacaagactaatgaaacctaacagcctctatttgctaacttttgaaagttgtacataaacctcacaaacaatagcagttaattctgcacatatcatctaaatttggctttagtaattgaaactggcataaacttagaagctcaatatgctaaatttgggaggaaaacgttagctatcatcttgagttttttacatatgtaatctcaaatattactaataagtttagagctctgtatggttgataatttactaattagaaccatgacatcaacaatgaagaatacaaaacatgatgaatcaacgagaaataagaagctcttgaattccagaaaggagataaaaatgactattatattacttcccctctggtcaccagtatcatagtattatacataaaaaaaaaaaaaaatagcatgtatctatatttcatcttaaaagcaaaaattcaattttttatttaataaaaatataggcgtatgatctatctcttaaatatattatttatataaataatattaattaaaataaaaaatttctaactttctaacaaaaatatcaacgcggtacaccgcgggtcaatctataaataatacaagttttaaatctttattaactcttaaaaaaatccaaaccacaaacaaaataatattaattttctcggcgaggcttgcagcgtggtcggcagtcagcttctccaatgagagttgtttgcttgggactccgagatctgtggatctattggatgctctgtcttataaagtgtcggcgaaggctctggtctcattatgtttcctgttgcttgtagcggatccgtggttgtttgtctcactctgttttgctagtccggtaagcagactttccaacctttcttcatagcctttttgttagggttagacggaatcgcttttgttgggttcttgagttggctgtaacagtttcagagatagtatcgtttagcttctcttcttcttcgacggtctgggatgttgaaaaggcaatgtctttccggttttagttgtttaagtttcgttttgtctctggctgttttggatagaagatgggattcccattttatgctttttgatgaatgaacgaatgctcgttgtggtgattatctggcctacaagttcttttgtattcttgggagatttctttggttcactctggttcgatcttctgctgctcctgattcttcgagaatggtgttacccggtgtggattttttgctccttgtctctgcatttcagatctgatcgagatctggtcctatggttttgcttctatctaggtgtaaaatgtcgccttgtctccgacgtcaccgtatccggaagaaagtgtgaggttccatgtgtggttctgtctttgcggattatgaagattagcataggagttctgttacttttaggcagtttggcatctttagaggaggattagattatcgatggttggccacgggcatcttcgatatgtactatcaaaggatctcttgaagtatgctttccttgttgggttggtttatggtcccatttggtcgagtgttttgttttggtctgttcttgtagtggggttcttctgctttcattatatgtttgtatcggtttgtagccttgtagtattgtttctttgcttcccttacatagggctttagactccagagatatctttgttttctgctagcatatggttgtaatcttccaaatatccttcatggtttttaataaaatctagatgacaaaaaaagatctacctcttaaatatattatttatataaataatattaattaaaataaaaaatttctaactttctaacaaaaatatcaacgcggtacaccgcgggtcaatctatagataatacaagttttaaatctttattaactctaaaaaaacccaaatcacaaacaaaataatattaattttaataataaactaatatacaacaaatatagaacataaaacatgaattactcaaattttacaaatatagaaattatgtgtcaaggatatattattcgtatataaataataattcttataaaaaatatgtataatttttcaatgaatatatccattcgcggtgtaccgcggcttaatatcttatacgttaacattttggggttaaaactaaacttcaaagttatttttggtgggagaagaatttgaaagtgattggcaaattgaggattttagcgacatttttttcctccatcttaaaggattttgatcgaaaggttgatgtcgactagtattcaacatggaaatgaattgccaccataagaagaaacactatatgtccagccttgccaaaagctcaaacagaagactcacagacggatttacaagactcatgaaaccaatctggttccctcaaaaaaacactcggattaaccagttcttcttatccttaggcaatgaacttaagacctataatctatttctacatatttttttctaagcttttaagcaactgaatatccctgttcttgcagatgagctattttggtttcattctctcagcagagtttacactgaattgtgatctctggaagtagaatagcctgaacaagagagtcaaaattgacacaacaagcatcagaagcctgcgaactagctaactaagagtgatataaacatattctatcatttcacaaacttatatttatgcaattacatctttatttcaatcttcaaaagagaattaggatctaatgaatctaccagagcaattgaaagtgtaatgtgaacagttgcttactgtgagtttttgactgtttttgtctgctctgcttccagctacgcctagcaatgtgtagagaatgtacggtggttgaaaggccgatgcacagatatattatatagaaagcctagcaggcagccagagtcgcatttgcggttttcgtctctagaggtaccacgttattactttggcctttacgtgctatctggtttaagtgataggcctccttagccataccagccttaagaagacaagataacaaagaactcacagtaatcttatccggtgaacaacctatcgcaaccattttgtggaaaatgctaactgcttcaaacatccttcctttcatgcaatgcccgattataagaatcgtaaatgtgatcttatctggtttgcatttcttcttctccatctcttccacaataacatttgcctcattgacctttccagctttacaaaacccatcaatgacagggttgtacataaatggttgtggaataatgtccttactagctaactgccccagaagttcacgagccttgagcagcctattctcgttacagagcgcattgataagaatagaataggtaaatgcattaggaaacattcctctggcattcatttcttcccaaagcctaaaaccttggctcacttgtcctactctacaatatccatcaattaaggaagtaaacgtcactacatccgggaaacagccaaaagaaatcattttcccacgaatttcttcagcagtaagcatctcaccagctttcgcataaccatcaacgaggacattaaaagtcacattagttggatatatccccaaacgaagcatatcatctaacaaactcgacgcttcacgcatcttcccagctttgcagtaccctgagatcatcgaagtatatgtaacaacatcaggagagcaaacactacccgacttaacatctttaaacatctcactcgctttgttcaactcattactcttgcaaaacccctgaataagagtattatacgtaacaatgtcaggctcacaaccaaaaccactcatcacacccaaaagctctaacgctttctccgctttccctacgccgcacaaacctcgaatcaaaatgttaaacgtctttgtatcattacaagactgaaatctcaaatgttcatcaaaaagcttcatcgcatcttccacacgatccaacttcaccaaagtattcaacaaactattcaccaccatacaacatccttcaacctcaaaagactgaagaagcaacgcagtagcgaaatggagcttacctttctcagcaaacgaagacactaagaaccctaataaccgattattcggagaaaccccatcgctcttcatacactcaaacatctgaccggctaaatcgtgcaaaccggctttacaaagagatctcgttagcaaattataagtccaaaacgaatgacgaatgttcaatttgaatctactaaactcccaaaatcgaaaccctatgtgaggattgttatccaatttcttcacaacctcaaaggagataaacggatttagattcttgcttaagtaacagaaacagagatctgaatctggaactctgtacacgaacaaagtagatacgattttgactaaccaagcttcaggacaatggattacttctcgtgtgttgttctgtagaggacgagcttgagctcctccatgagaatgcgtgtggaaatgagcgatggcggtcgcgaatgttgttcgaatcataccggcgtgagaatatcggcggcggagattgagcttaagctagggcttgttttggtcaatctcatctgtatttttttttttcagatgagagtgtgtgaaactgaaacgtttaccaaggaaggaacaatagaaccttctagaggagctagaggcttttaatagttaaacccgctaaatgattaagagtctttgtaccatttcacgatttcagagtctatacaagacaactgttttcagtcatatgtttgggctcaaggtctctgttttgattcacagagtgaagtaactctttaaaagcggactaggtgtccgtcaagacgctaggcgctcctgtaccgttttattttttaaaaaatcggatccattaagcggtgaagtagatttggcggacaatgcagacataaaacggattagacggtatttaggcgcgtttaggcgggatagatgagataagcgaatctaaatgtatcttattatttttgaaattttttaaaatataattaaaattgtgtttaaaaacaactatactttttattattttattttattttactaaaatgttaaacttaaattgtttttcaaaaaaattgataattttcacatttttctaatattttttgctatagattatgtaatagtatcttattatataaaatacggttttgaaaattatagtaactcacgagatcatgacacatgtcaattttaacaaccttagattttggcgcatggaaaacaaaattttcattgaaaaaatttgaaaatagaaaaagataattgtaagaaattatgtttgaagataattataaaaaacagtttaaggggttgcgtagacaaccgtttcgaccacctaaaattatgtaagttttatttcattgtattttttccatttataactatataaatttaaattataagtcttaacacaatatatattttgatataaattaaacaaatgtttttttgcaaattaatgtttatgatttgatattttctttacttctctctcttctctctctaaaattattcaaagagagttttccttcttttatctcgccgtccggtaggtttgctggttttagtatccggataaggtccggttgtgccgttagtctagccgtccgaggaattcggctttcgttacggtgttccattaccgtatttattttatccggatttaatttccattagaatccgactttggttcaggtgtatatggcttactttggtgccgtatttatgttttctttcaataatcattgttcttagtaccgatatctttttgggatttccttctcctcccgcttctcaaggttacttggttttgaagggctgaattttgttttcaagtctaatctctgtttttttttgttttaatcaactagtagagtctgtttcaacccaaatcggtgttctcaatcctttgatttgaaatctcaattaggcatatctggaaagaattttatatcaatagagattttgatttctctttgtaaagatcgttgttgttcttgaagaatttagattaaactacaacttgtgaaagttttcatttctaggttcttcttaggattcgatcattggttagtttgttatatctgaagtggagcaccatttatagtagagattttgtagagcaaaatggcagattcacaggagtgatgaagctgtcatggaggatcgatggtttacttgaaacgacggtggtactgttgagataccgataacacaaactttggcgtaagagataaggatcacatatccacgtgtccttgctgctaatgagatgatgtatttgtgctgagtttgtttttagtatcacgtgtaatagtggttggattatatcaataaagaaaaatacttttatcggaaaaaaaaaagatttgatacttttattttgctataaataattttatttatttataatatcatatttataatatttatattattacatcgatagtttaaagtctaccaagcagacctctctctcttctcacctttacgtggtttaagagatgatttcacttagagtcgtggtgtaattcatctcgttgtggttagaaaatacagtgaatttcggttgggtagcgttgaatccattttagtgtttcaaggtgatagtagactgattcattgtatttggttaaaatatgttgtggtcgaatgacttgtacttgtgaattggttaatgaaaagttgatgttaagcaaaaaatagaaaaagtatttgttttagctaactctataataagtctaaaatcttttgttgttgaagaataaaaaaaatactatttatgagaaagaagaaaaaaaaggtttaaagcctaccgcttaggagtgggcattcgggtaagttggtcgagttcgggtaaaacccgatctggtacgaatcttttgggcagagaagtttaggatcaaaaggtaaatctaaaatatcggtttggttttggtttagatctaattgaattcggatcggtttggtataaatttttagactttttttggaacatatactcaaattttcgggtaattacccagatttttcggataaatatctggattttcgggtaaaatatcagatttctagtgaaatttagatttttcaaataaaatattcaggtatttttgagttcggattcgagtcggattcggactcgatttcgggtaaaggaatttaggatccaataggaaaaatcttcggtttggatacagttttgggtccaactttcgggtcggttccgattcggataatcgattcgggtgttttttgcccagccttactaccgctttcttgaacaccggagtttttgcataataattaattaacaatatatcagacaaacaaaataaaataaaaatatgtttccggccggtgtaatttgtctgcaatcgacttctctgatcaaaatgttgacataaatctcaaatcgaatcaattactttagagatttcccaaattccgtctcgaagatgtcaacggagagacgtgcttcgtcgaatccaatgaccaacgaagagaacgctatgtatatatctcttacgctctcataaccaaatttctctcttctttaaatcaattttaagctgaaatttcgatttgggtttcattttccatgcaaatctgtattaaaaatgcttcccttattcagtttcttgttatgaaccaaaaaaagtttacatttttaccaatggtgtgttctttgtaggttccttgatatattgcatgaagcaccattatttggtcacaggaaatctagaagccttgttggaagttacctctatatgcttctattggcaagtttcttttgattcttttgattatatggttcatatgcataatgttgcctttgatagtttttgcctttttacattaggcaggttatgctattttagctgctggtgctccttggatgtttcaccgagtccaacagttgaccccttcattgctctgctgctgcgatgttgcgcttttggttgtcacaggttctcaacttttctcctagatttggttttactagtgtttgaagctgtgcatgtatgtttgcgataggttcaggttctgtgtcctgatgaatagtaagatattccttcctttattggttttgagttttagattgcaatcaagaacatagctttcaccttcttcttagacctacacagtcttctaggttgttagttaaaggaggtggaacttctgttacaatcctatgcaaaaaggtctacggtagctatagaaaaacataggtcttgctaaagccttggactatcttagtaccttattctctcctcttctcagtttgtccgttttttatgttgttatttgtcaatggagagcacatgaatgattgtgctctttcacacacaacattcaataaatgtttctataaacagatgcaaacatgtagatgtagtaaaatattgatctttctcgccttctcatcagcccctgttcttcactagttgcaaccactgtacaacttttttttttgccagtttttattacggactcatattctgttgttagttggtttggctctatattcctataagttaatttctctgtggcctatcccaggtgtctttcaacaatactttgtttatcaagtccagaaaatacgtctccaggtacaaaagctcaatagcttaagtgatatacacatagtttactactttttgggttttaaagattagatttaggtatgaggtgttagtttcatttactaatgttttttacttccttgctcatggtggcatttattttagtaatagactggttaatatgagaattctctgcagggttattacagtttcagtcaaaagttgaagcatgttgttcgtctgccatttgcaatcgctgcatatggtattttaccaaccaagtgctttttcttgttccttttgctttttaaatctattgaagatgtctgtgattaattcatgagaatgaacatatgaatggcttcacattttgtttcttcaattggcaccaaacacctgttagatgaaacaaacgcatatataaaaccaaggaaggtgtttcgtcattatatatgggaactgggaagtgaaatgttagtagcagcattttgacttgttagttcatttgaagatatgttcaagatttgcatggaaactctgattttaaccaaacttgttccttggctcatttctgacctcgtctcggatttttcttaggccacatgttattgcgtttatgattaatttaatacctctttgatattttaccagggactgctgcaatgcttcttgtgatagtgtggaggcctcaaatccacattctttctatttcttctttgcaacggttggtagctcattgttcgcacgttgagtttctttaaacctactttgtttgcattgatatgaaacaagagcagctcttgataggttggaggaaaactgtttttaaccacgattatatatatatgatctgcaggatcatcatgttggttgaagcagtgggcgctggctttttcatgggtttatacatcggtgagtgagtgagtggcttgttctgctatgtcgtcgctattttttttttcttctcacaatccagaatgttacactcttgacataaccgtcttatgtaatagttaactgtgtgttgcctaaaatcaaaacactgaatgacaatgcttacgattggttagtaaggaaaaaacccatcagactgagtgttatatgttaatgttgaactacattctaaaccgatagttttaccgaagtactgagtggtgcattttgatattcaggttatgtgcaccaatacaattccgtgaattcccggccagatgtcttgaagtcattatattctcctcttcagccgtcaagttctatggaaggtttgaggtactgaatgtccttaatgtatctgattttataaatttatgcagcttcagcaaataatgtacaagtttgcttctttcatttttgtttggtatcaaaggtattatgaaggccggctttctgatcaacaaacggctttgttacaatatcaacgcgaaaatctccattttctaagcgaggaggtaagtgatgctaccgatacaaacactcttcttaaaatattttccatctacgttgcttgattttctctttggcctttgctgttttgtgagccactatagtatctgaatcactcttgtctttgttatttgtgcttttcaaagattctgtgcttgcaagagaaacttagcaaatatgaacaatctgatgatggaagcacacctcaggtgaggattctggtttcctttataatatatcaaatagctgaattcctcattggttcatttaaatgtataataatgcttgataggttgatctcgcacatcttttagctgctcgagatcaagagctgaggacactttcagctgaggtaatacttaatttctgaagcttccatctctataatatgataaaacaaaaactctataaatatgtaaatctcaacaatgcagatgaatcagcttcagtctgagctacggcttgctcgttctttaatagccgagagagatgcagaggtgcagcgtgtcaacagtaccaacaaccaggttctgcaaaaaccggcattgtaggaaaaaaactcatttagattttagtcaagactctcttaagtaatcttgtttgcgggtggtgcagtatatcgaagaaaacgaaagactgagggcaattttgagtgaatggagcatgcgggcagcgaatgtaatcttaagaaacaaacctttaatcttttctagtagaccaatttgattactgaatcagttttttgtttataatatcagcttgagagagctttggaagtggaacggatgtcgaactcagaactacagaaggaagtagcaagcacgcgtagaaagcagatgcttgagacaacaacgtctgagcaaccttaattctaatatgggaatcaaagcttatataggtttttaacataatctctaaagtttgatggtgtaactataaagatcatggaatgtgtctacggaaagaagtttgtgtagtaaacggctcttttgttttttttacatttctcttgaaatagttttcttatattaaaatttaggtctaggtaaataaaccgaaccgaatgtactgaaccaaaaccgaagaaaaaatatcaaaccgaaccgaactgaaaatttgaaaataactgaatggatataaaattctataatcgtaataaccaaaactgaactggtaccgaacaaaaatatttcgggtaaccgaaaatatccgaaatataattatacaagtattagttatttcaatactaaataattaaaaatatttgaaaatgtataaaaaatagtaaaaatacttgaaaataaccaaaaataaccgaaatatccaaaaatattcaaagcaaaataaccgaatatatatgctaaatttaaaccgaaagaaccggaaccggaccgaaattttaaaataaccgaatatatactacactttagaaccgaaagaaccgataaccgaatagatacgaacagaaaccgaatggattaccgaacgccgaaaactatataaaatcttttttttttttttcaaagtgtctaacgtaataagatggttcagtggtttgtttaaaatctccggttttcgtaaaccggtaacttgtactgataccagaaccgaaccaattttttatgagaacaaaaacctcaaaatcattgttttgtttgttgggataagtttgagcggtggattttgtatggagccgccgagttcgagaccggaggaacctccgtcatgggaggacctttacaaaatcaatcttatgccatcggagctattccttaagttccgcaaagagcttcaaggccttcgcgtcggcgtcaatctcgaggtctttccttctctatgttcaacaaaactttgagtttcttcttactggctaataaaatgggtatgaagttgtgaagtttgaaacttttttaatgataatggatttgagtgttggggttaagtattcggtttataggcataagttcatctattgatgcattcaaagagacttgttttgtgctgtggattgagccatgagatgtcatcactgtgttttttcgactgtgtgtgcttttatataacgaaaccgagaatcattaacacgcgaagctt

SEQ ID NO: 178 - DNA, 106716 bp, Arabidopsis thaliana
gaattcatcggattagtgagagaagacactcagaaaacccaatcaattttgcaaacagaaatggaaatcgaatttttcaaattttcccattttcaacttagggacttcttttttttatttgaattatcaattttgatttaatttttgtaatttaggggattttgtttttataatttagaagcccatgaaatatgtcaacaagcccaaatgaaataatcaatttcaatttgctagaagcccaattaaacgacaagcccatgacaatcccattttcctaatcgttcttatcaagagtacatatgggacaagcgaaaggtcacgtctccacttttctcgctctgttattttacacgaaacgagagaatacaagaactcgtactgtacaccggaaaagtgatggatcagcagcggatcatacagtccattagaacctctgcaccttcttctcctgcatctctgacaccttcttctccggattgttcttctccacccccacccccctcgactggttagttgtcgcgggtcgatcccaacgagagctggaattccctcttcaccgtgtaaatcttcctagagcagtcgagccgacgctaccgtggatgagatctcctgtacaaggagaaattgagctggatttcgtcccagaaccaagagatttcatctcgggagaagttgtgtatccgcaaaagttttttgcctatgaggttctatccagcgagatgtgggagacatgacaaatattttggtgtaaggtaaatgtaatgtgtttcgtagttgtttttgctaatgtggtttagggtttagttgtattgatggtttagggtttagttgtattgattgttagaagcgagaaagtaacatttatattgttggacaggtggataatcaacatgcagcgtatcgaaggcgtcacgcccaactactcgttaagttgcaggacatggagagaggaaatgaggcgaatggaggctcatccgaaagattgggtttgttacggattcgacaaagtagctgacatccctctgcctctaaggaaatggtgtgttgagtatgatggatcgagcccgtatttcaaaccttggccagaatcaagtgacagcaccggggacgggggagcagatgatgattttttatggagagtggatgataaccccgtcaagaatcctcctgataccctctttcaataaacattcggttgatagttgaaattaacattatgtgttttttacttaagtttgtaagataaaactaaattgtggttttaaaactttattttgctaactatctgggttttcaatataatgcatgaactattatattaaaatcattttgtaaaccattagaactagttcaactgaacgatttgaaccattttataatcaatcgagccggatgaactatgtaggttgaaccatttgaactaatcagtcgaactggatgaactatgtccgttgaaccatttgaacttcgttgttgaaccagattaactagattagacataccaaaataaacagttgaacctgttatgcaatttgaccgatcataaaatacacatagatgtacctaaaaaccagttaaaccaaccgagtttttaaccattttgtaaaagtaaacatcattacaatgcaaaacaagccaaatgtttttcaataaaccaagtgttacacaactagttaatcaatcagacttccgcattctctttcgcttcacatccacccccacaaacggtgtcttaataaggcgggatgctttccttgttcgcttcttttatgtttctattacatgtggcacatcctgcttcttcttgcccccgccctacttcttcacttttcctttcaccttttatccgtcatctttgtctccttattacctgtagacatttaaaacaaaacctaagtcctatattcatatttttataaccaactgacattaattattgtacttactattttttgcaacctctggagaaggttctctataaaccactatatccagtggttgttgcctttttatggtcacacaaccctctggcgacgcataaaacacttcctcctctgtttgcttcccatgttgactttcctcctctgtttgctttccatgtttcttttccttcagatctgccacaaataactcaatagacttcactctcccatcaatggcatcaatcttatctcttgtttcctcaaagcctttggtcatcatctgcgttagtgagtttatagatgccacaactgcatctaattcagggactcgaggagggacagcagtcggaggaacatctttctcggggacatcagtcggaaggacatctttctcggggacctcattctcaatctcatggacaacatcatcatcaagatcattaacaatacatcaagaagaaatgtccagctcacacattcctttccaccatatcttcttcttctctacaaatagtcgccctttccaattgtcaataacaatatctataagatcgaggtcatcatcaacatcatcttctaagagactgtccaacagatatttctcatgatactcaggtaccaaatggctagcaatatcctgtgaaaagaaactcatttagcaatcaagcaatctcatgatatacagacaatcaagtaaatacagaaactctaacctcactattcccaagctctttatatataacttccaacgggacacctttcatgctacattctttaaacttatgcttgcacatccttggacagtccttctctgcacgtacagggactctaaatttcagttgaagctgtagaatagcctcataagccagaatctacaaataacaaaacaatgtttaatatcataaaacctgtacattacaccttatactcatataatgatcataaattacttatctcgagaggcacaatgaatccactgtagcaaggttgagcttttggtttcacgaaaccatccacgttcttcatcattttccttatcccatccaaacattccaagaagtattaacggccccacagaaacgtctcgtactcatccaaaccgccaacaatccttaaaagaatctcttctatgtttccatcattctttgagtttgcttttactaccttgaccaggaagtacaacagcactaacttcaacctatctgtaccgctgcgtatcttctcgtacttagtaagaacttttgaaacctttatcccagtttcttttttgaagatcctcttcacaaactaagtattccccattgtcttgagttattttgggtaactacggcaatcaaactcacttaacaacgcatgctctttaatggaatacctaataggtactctatttacaacaaaccaagcctcctagagcaaatctgtcttcactgtgcgaagcataagcacccacatgccttgcatttggtggttaggctcctgagacatgtggaatatacgcttgaactgtgggtgttttcgaaatcattttgcttcttctttaaaccttctatctatcattgccactatctgcgtgacttggcacctactgcttatcttgcacactttgtcgtattctgtaaaagaaaaatacatggtctctggcgccagtggctgagaatcatcttcatcatcctcctcctttaaactatcattgccagcctcatcttcctcattttctttacaagtaacctcatcatcctctggcccagaatcatcatcctcggcctcacatgtatcctgcaactgcgaattcaatgaacattgaccaactgaacaatttagaggtatcaaactaacaattcatatgtactcattgaactagttccatcaaattacttatatcaaacaattgtcacatatgaactagttgtatctaaaacatttctaactaatactcaaacaaaacaaatgtgagtcatagagattccaatgtatatacttgacaattaatgttctctactccttcttttgttgtattcaccatttcctcctcctccagctcatccccatcaccttcattcgcttctaggatttctataaagacagcctcaagtagaggttcttttgcagtatgggttggtggttatgtcttacccttttcaatatcggcggttcctttagaagaagcctcatcaccatctagcgattcctctatggcctcttcaatttcagcagttttttttggagtcttattcgctgaaacatctgtttcagctggttcggtcggaacctctacggcggcatctccgtcgatctcaatttctgaagaaactgtttgtgatgtcgaaacttcttcggacggcctctccgtcgactcatatacatggccaccggtaccatctctaacacgagccatcaaactattacacgaatcaagaattcgtcgaaaaatcgtgaaagccgaaaaattaggaatctgattttggaagaatctgaattttgtgagagccgtttttttaaaaatcaggaatttcacttaagtgtttgggatgagttttgtatcgatggacatatatcttaattggatcgaatacttttttgggtcgtctaggttttagttttttaccaattgttttgattttttcttatttttagtttaacaaagaattaaaaattagaaaaatgacattcttgattttttttttttgagataatggcattccaaccatatattctatcatttgacttaagaccgtttccgtttactaaagatcgatataaaaattggctaaagattagtaatttaaattttttgttgtttcaagttcaaaatcgcattgcatatttggtaaaggtttaccatatttgacacgatatgtgggaaaaaaagaaagtaacaccgatccaaaaaagaaaaggactcttaccttaactttttattattaacatatttgaccctaaaacttcttatctgagcttatcagaccaaaccaaggtcacaaataaaaaagaaacagatttgtaatcgattgttcgattcacttcatcgttggcacacacacatactctctattcgaaaaattcgccactgcaatttcttctagggtttctggtaatcctcacttagccgggcaatggcgagtgtgtacataccggttcagaattcagaagaagaagttagggttgttcttgatcagctccctcgtgacgcttctgatatacttgatattcttaaagccgaacaagctcctctcgatctctggctcatcatcgcggttcgttcttttccactctaattaggttctatctggaatcgagttttgttgagtttttcttagttaatggctgatgggttttgattaacacttcaaaagttagttgcttttgtggctgatttgcttaaagattgtttttttttccaattctgattttggtttcatctatggtgaagagggagtacttcaaacaaggaaaaattgaacagtttcgacaaatattggaggaagggtcaagttctggtaagcagttatacgatgatgctgcttcaatttgttctagaattggttatttcgaaaatataagtcctttttgtttctttttggcaagacattgacgagtactatgccgatgttaagtacgagagaatagcgattttgaatgctctaggtgcgtattatagctaccttggtaaaactgagaccaaaaacagagagaaagaggagcaatttatctctgccacacgatattataacaaagcatcgagaatcgatatgcatgaaccttccacttgggttgggaaaggtactaccagattcgtttcgactgataagtttctgttgcaagcaattcctataacaatctttcttttccggttctccctgtacaatgtacgctttaagaatttgaaggttgtgatgatgctctatgtttactaagatacagaatcctgaaatgtaattgtctgcttacaggtcagctcttactggctaagggtgaaatagataatgctcttcaggcatttaagattgtgttagacactgcccctgataatgttcctgctcttctgggtcaggtataatgacttgtgatttcattttctgtcacttagctaataatttgtaggtaggtagattctgtatactagaatttattggtggtagtaagaatttgattctgacgctctctttcttaccaacctaggcctgacacagtattagtctattgtttacttttctgcaaattaataacttgctctatcacgtatacaggcttctgtagaatttaatcgtggacgattttctgagtcattacaactatacaaggtaagcttttccttataacctactatatttctgtataccacttcttcattttggctgtaaatctcatggctttgattgttcaagtgaaccatctagtctatttatggaacaaattggtagtattttgatttgtctatgttttgaattcttttagagggccttgcaagtatttcccggttgtcctgcagctgtgagactgggaattggttttgtcgttataagttggggcaactagataaagcacggcaagcgtttgatcgcgttttgcaggcaagtgggactgggatgtttatctcatcttcttatgacatagctgactgtatgcgtcaacaaatagtgctaattaccataattctatttctgcagctagatcctgataatgttgaggctcttgtggcacttgggattatggatttgcaagcaaatgattgtaagtatacctcagttctaaatcttatgataatgcgtgtgggctggaaagattctattaactttacttctctttggccttcactgatgatattacatatgtatagctataggaatgaggaaaggaatggacagaatgcagcaggcattcgagatttatccctattgcgcatcagccttaaattatttggccaatcacttttttttcaccggccagcactttcttgttgagcagctgactgaaacagcattagccgtcacaactcatgggccaacaaagtcacattctttttacaatttagcacggtcatatcatagcaaggtttgacatttttgtcctcccttgtatattccattcttatctaccctctgagcttgccagtggaggaaaaaatacgagtaataaataatttatttgggttgtgatatatttgaggcgtttttttcattctatgggctgttatagaagaatgcatctttttttgtttcctttgtgtaaccttcctttctgatgtctgatgatggtcttgttttagggggactttgaaaaggctgggatgtactatatggcagccatcaaagaaactaataataacccacacgaatttgtatttccttactttggtaacttttctccactcttctgctgaattccccttaattcttcggatgttaccaatctgagtcattactcattagcaatgaagatactgcacctttgtcatttatttcccttttagcagtagaatatatgaaatgagaccatcaataattagttccagtctgtaaaacgtatgattatgaacaaatttgtgtataatatctcgtgcttcaatttctagtattgctcagtttggattgatgatcttatatgttcatttagtttgatttttttttttgtgttgcaggtttgggtcaagtacaactaaagttgggggagcttaaaggatctgtatttaattttgagaaagtattagaagtttatcctgacaactgcgagactttgaaggttaaatgactgcaacctttttctttattgatcgttcattctgtatttcatcctttaaatataaaatgctttatgtgcacgtttcttttctttcttaggctctcgggcacttatacacccagcttggacaaaatgagaaggcccttgagtacatgcgaaaggccacaaaacttgatccacgtgatgcccaggttagtttggtttaacataattcttaagcctgatctttcaaaaggtgttgatacttgcatgaattctttggttgtagttgttatatagtttaccttactgtggatcactttcgagtgacacttccacttttgttacctaaattgtaacaccagcacacttagtccaagtaaggaagaaaaaacatagtagcaagacatagttctgccatatatcttgagaataccttttgggtttgtttcccccacagctcatatgtgtggttgaagatctaatagggatgataatcatctattgactattgcgataattttttccttgatttatagttttgggttttgtaggcatttgttggccttggtgagctgctgatatcatctgacacgggagccgcccttgacgccttcaaaatggtaaagtgtgatcttgataattgtatctcctcttcaagtacatgatggcatgttgtacataaagaaagacattaatttttctgagaaccattaatgaaaactcccaggcacggacgctcatgaaaaaaggagggcaagaagtgcctatagaagtcctgaatgacatcggtgctttacattttgagagagaagaatttgaggtttgtagtgaggttgtttctgcttcttagctttgatattttgctattggcttcaatactctttttccttgcagtctgcgcttgagaattttaaggaggctctgggtgatggaatatggattagcttccttgatgaaaaagaaaatttggaacagacaggtgtatctgttctcgggtacaaggacacgggcattttccataggctgattgaaagtggtcactctgtcgatgtaccttggaataaagttacaactttgtttaacctggctagattacttgaacagatacacaaaacagaagcagcgacttttatgtatcggttgatacttttcaaggtctatatttcctacttatttaatttgatattatttgctgtttcactttgtgatgagttttctagtggtagacttgaggagaaaagaaggaaaaaaacttgaggagccgttttctgattattcctgtctgatagatgattttgagtggttacttggtttttacaaatatattttgtcttaaaacccttctttcgcggttttttaaatatctattcatgtactaaaagtataaaaatgggaacattgattcggcataatgacttccttggttataattgagtggcttctgctctcttgggaagttcagcatcgtttcgtatatgtgctatatagttttctgctttatatttcttctgtttcttatagtttttggatacacctaccatgtcttacattatttgtttgaatgttcaccctgatataagcttgatccttttatttctctttcaataatctgatgacgacttttgatttctgtcaacttaatctgactgcctatccggtgcagtatcctggctacatagatgcttatttgaggcttgctgcaagtgcaaaagctcagaacaatcttcctctggccattgaactggtcggtctaccaccgttttcaacattaattttatttaatctgtagcagcttgttttctctctctgaccgtcttttcctacttcccctataggtgaatgaagctctgaaagtggacgataaaaatccaaatgctttgtctctacttggtgaattggagcttaagaacgatgactgggttaaggcaaaggaaacctttcgagctgctaatgatgcaactgatgggaaggactcatatgctattctttctctggtatatatttttatttccgatttttttgcgtttcagaataataagaatcatcatattaagttccttttgggttgttcaaagctcatcgcattatcatatcaatgaatcgattttatgtgagcaccccacacccaaatatttgtaccctgccttttctatgggtccaatctaatcagctattactgcgatctgggctctcttgtaaaacacttcagtcaagataacgatagggttcttttcaatacgtgtatggaagaccagccctcattctgtatggttcctctaccagcagcctggtgagggctggttgtctagcagatatctaactaccttggagtgaattctgtcttgattataaatgattggaacaattattgtacaagctatttttgtgtgtgtaatatttcttcctggaatgttttaggggaactggaactattttgcagcaatgcgcaatgagaaaagaaatccaaaattagaagctacacatctggagaaggccaaggaactctatactaaagtatggtgtttagtttttctcctttctctcttctaattattagtaatttgggaatatgtatgtgcttctggggggtgttttgggtggaggtttgcctgtagaaacctgaacacgttgttgaaatttttgctataccagtagcattgcatgcttaaattggcgatgtcctctttccatcaacgctaatcgtctttctcattgttgatcgttgggattaacaggtcctgactcaacataattccaacatgtatgctgccaacggttctggcattgtattagcagagaaaggccaatttgatattgccaaggatgtttttactcaggtcagcttttatcatttactgttcatagtataggctagctaaattcttgaaatcattggaattttgtgaatgttttaggttcaagaagctgcgagcggaagtgtatttcttcagatgcctgatgtatgggtgaatctggctcatgtttactttgctcaagggaattttgccttaaccgtgaaaatggtttgtcattttatatagcgttttttttttttttaaattcttttggttgatttcgatgttttgcttaagtactctgttcattatctatgttgttggcagtatcaaaactgcttgcgaaagttcttttacaacacagactcccaaatccttctttacttagcccgtacccattatgaggctgagcagtggcaagagtgcaaaaagacactattaagggccattcacttgactccttcaaattacacattcagatttgatttgggtgctgtaatgcaaaaatcatcgtcttccacactgcaaaagaaaaaaagaacagctgatgaggttaactaaagattttcccttgcttctttctgactctagtcttgtgtcgtagaagatagacagatattaacatgcatcgattgggaatttatcagactatgaacttgcttctacagcttgtgtatctagaacttttcaccatgaccctagcatagtatgttagtcatccttgctaagtaatggctaatctagaatgcaatactaggatttgttgtcttgttttattagaagatgtctagacaatactaattcgtccaatggggattaattgatttccacctgacaattacttgatgactctgcaggtgcgctcaacagttgcagaagcagagaatgctgttcgtgtattcactcaattgtctgctgcttcagacctccatgttcatgggtttgatagcaagaaaatacaaacccatgttcagtattgctcgcacttgctggaagcagcaaaagttcaccgtgaagctgctgagcaggaggagctgcagaaccgacagagattagaagttgctcgtcaggctgctttggcagaagaagcacgccgtaaagctgaagaacagaggaaatatcaggtaactattgacttgcaagttaaccatttgcagcaacaaatttattttggtgatatatatggaagcttttcaagtcagtgatatgcatttttctcttgggcagttggagaaaagaaaacaggaggaagagctgagacgcctaaagcaagaagaagaaaaatttcagcgtataaaggtaggaggtctcttgcttttgattacagtgtctatgaagatcagatttctcaacattgttgtgtagtgtcaagggaaaaattactctttggtaacactttttagggtgtatccctttgtcagtatggtgtcttgagaagatgtttaggatgacatgctgattttgttttgtaataattaatgccctaggaacaatggaagagctccacacctggatctaataagcggaaggatagagtggaagatgatgatggggaaagtaagcccagtgagcggagaagaaagaagggtggaaagagaagaaagaaggacaaaagctcaagggctcgacactacgaggacgatgaagaagaagctgccactatggatgatcataatgaagtggaagatgaagacgccaacactaattataacagggaagatgagatgactactcaagaagctgaggaacctgtggatgatgatgctcatgatcttctcgctgctgctgggctcgaagatcctgatgttgatgatgatgaggtaatacataaacttcaatccaattcatggaactacacaaatgcaaaacacaatgtcacactaagtctgttttggtgagtacaggtacctacttcgggtgtaaggcgaagaagggcgttatcgtcatcagacgaagaaggtgaattaatggaggagagtcatccaaattcaagcccccagaaagaaaaagaagagagcaatggggaagctggtgatcctaacatggaggaagaagaggaagaggaagaggccaattgagagatatttcatacataacaacagatatctcttgtgtgtttgtaactttagtgacaaagatttcattgattcaatttctctagtagtcagagtgtgaagacaatttacattcacaggccaaggatgatcagtttgtattttgggttatttggattgagccttgtttttatttgctattgttactaatagaaaagcttttttctttttcaatgtttttaaacccgacccggacagtaaatcggattaccttctggatcaccaggtcatggggtcaaccgggttggactacgggtcaattgattaaaatttacttaatatacttaatgtcaatagaaattacttaattttcataaatataaaacaaaaataatcatatcatgtttaacaaaatatgaaatcaaacaataatagaaagtgactaaatttttcaatccaactagcagtctaaacccgtaacaaatatattaggagatcatcaatgacgaaaataaactaataaaacatatatctcgaattcaaacaactaatctcggttgtctttctcaccaattcattgattttcttaaagcagaattatgaagtcttcaccaaaatctaaaatatcaaatgagataaaaaagtgaaaataaattccaaaaataattgaataaagctcaaatattttttttcaaactcaaacatttttttttcaaactcaaatagtctaaaatgctatatttaattccaaactcaaataatgtttttaaaacttacactcggccggttcaaccggttgacagagtcacaggttaaggcgagtattttcgagtttgaaattgtcggatattagcactaaatttaaacagaaaagtgtctagatcgcggattaaccgtctaactggacggtacgagtcggccgtaaaaacaccggttgaaacaacttgatacgtagtcaatggttaatgaaagcaaaatagtaaactaaaaataaataaagaaataaaaaatacagaagagtgttgtcagaaggaagtggaagagtcagaaacgtgggtgtgtgtgtgtgtggtcttgaaggatttggtactgtttctgcagtttcttctgttcccttttactttaatttttcttttgggtttttaggtttcatgttgctctctctctctctctctctctctgtaggatctctttcaacttttcagaacatattgactgcaattatagtttataagcaacaaaattacacgcacacacaagtataatttgctttatgtcatgtactcatgtgtgtgagtgaagaaataataattcagtttgatgagaataagagaagtcgtctttctctctcactgagtcagagcagaaagcttttgattgggtgtgtggctttttcagacctgaccaaactcagtcagggagcagaactcaactcaactcaattgcaaaacctgtcttttttttactcttttcttattttcttcatcatttttttctataacataacctttaagaaaaattatttactgttttaattataaaaaaaaactatttactatccacagtaaatagtttaatgaacaagtttctgacaaaaagaatcagaaataattaattacagaaacatgaattgataaatttgttgctaatcaatgacttagtgacatcgtactatcactaatattgacaagagatgagcagaaacaatttaaacattgaaaccaaactaatataactactttacacaagttaaatcttttatgctaatataatgcatggatcacaaaaagaaactcctaattaaattagacaaaaaaagagagaatttgcattaccatcttaacaagaaatacaaggttataagaacaaaagatgatcaaatgaagagtgaagtagaaacagaagatttagaagaaggccattcatcaagaaacctataaaacctcttgcttccttgctcttcttcattatcatgatctctttgtttcagcttctcctctaacatcaatggcctctcacgtgtcctcaagtcagtaccaaggatgaagcaatgtcgatccggctgcttctcctcgttgttgatgcctctacatgagccatcatcattatcttccattgctgagccagagcagcttttgattgacccggaaggttctatggagaagaaatcatccatgtatccacttcttcttcttctactttcaaacatgttttgaagataaaaaatagtcaatcattgtgttgtcattagagtaaaacagaggaggaaggtgtgtttgaaacctggaagaagagtcgagaaagagatttggagtgaattgagtaggaggaggctttcttgaggaagaacggttcttgcctctatgcatatgtctctcacagtacttagagtcagggtaagcttctttagagcatctccatttcttgccatcagttcttctacatcttcctggctctgcatctatctttcttcccattcccatctcatacacattccacccaactgaaaaaaaagagtcaaattcgtttacattatcaccaaaccctaaggataaccatcatagagcacaaagcaaagaagataaagtgtgcttacagtgtggagaaagagtgggagagaagaagcttgaagaagaagatgaagaagaagaagaagagaagagaaagggtcttttgatgaggaagagaagatgaggtggaacaggcatatttgcagctaagtacttgaacacaagagcttggttttcaagttcttcccattgtgattctgtgaatggaatccttgtagccatgaagagagaaagagaaagagagatgaagaagaaagagagattaaagattgggatttgtattggaaaattgaaagtgtaagagagtagtaggtatgtttttattgataaagtgtccattggtcacctgcagtctgcagaatctctgtgcttcatgtcctcttcttgtttattattcctttttcttatttcttaaaattttcttttcagctttagttttggttttatcttaagcaccatttcaggtttttcttttccttcttaaaagctaaattttgtgacaaggggcatagataacttatgtttaatttatttacgtattatattcaggagtttgtaacttttgtttgcgtttagaaaaacgagaaaatttggtaaccgaaaagagaatctaccaagttacatacgtatacgtaaacaatatccttcgggattgactctattaagttctaattatttttggttgacaaaaaaaaaatctaacaagtcatgaaacttaagaggtaaagttgtgtacaaaataataagacattaaaaatttcagctctaatgttgggttgttatgatatcttttgagtcatataacttatatctcaaactttagtatatgtgagaaagaaaaaataagaaaaaaaaaatacttatttgtgaaagaagcttgaatttaaccctacaatatttaagatgtttttagcatttatattcgatcctaaatatagtaagtaaatagccaagtgagaggatttatgtccctcttctattcttcttaatgttttaactataaaaaaagaaacatgtaagcatattgcaactattacaaagatcgttataaaggtttagctaaccacaaagaacattctcttaatcattcattatagtattagaaaataaaatgaaagaagtccaattgtaatgagtttataaattttgaattataccaaatcattatttttgttcttcaatcaaataaaccgtatcgtgtaatgtgacatctttggttagatagacgactcgtagtactcgtagctccaacacattcgacatttataaaattaagtgtacacggtccacttgtgttaaaaacactatgcatgaataataaattgttttgaataaaaaatatttatgagaatagaagtaaaaaagtttgagagagagagagggaaaataatgagtgagtctgcaaactctgaaaacttctgcactctctgcgactcttccctttcacagctctcactcactcccatacacacccatcactcatgccacatctctttctccctcttttatttttgttttcttttgaatttttctaaattattttatatttctcaaaagaaaaaaaactgtgattattttaattatcttttttctttgttaaagattattttaattatcaaaatttaaaattttgttcatgcctatgtaaataattcatttgaagtcggtcatcaaatgaagttagacccaatgcattaacagatggtgggggtttgtgaaaaaacctcagaaacttacacttcataaaaacatgatttattttcttaggaaaacctctaatactaaaaatacatctaaattgatcatataaatcatgttttttatccaaaaatatataaggttgataaattaactatatttaaaaagactatatttgagacgtaacgatttaaaaatatttaggcagttttttttgaaagattagaaacgattatgttgaagttataaataaaaggtgtttcacataatacatactcataaataaagttaatagcatcttaatcgtcttcaatttctcttttatatatgagaccgattaatttccatgtaaagattatttaatattgacgggaagcaaaacataaagaacactaagcacattaacgatgttacttaaaattttaaaaaggaatataaacaaactgttttatttgggtaattatgattacttttttcttcatttatttatatagaattaaaatacttacggagtcggaacctctaggaatagcaatcactatgcctaaacatgaatcaagttcgcaagcgtcgaatttgaaaggttgaaactttggaaatccaccagattagagaaaaactctctgcttttattaattaaaatgataaaacgtgtcgagcaaaaaacttagggtctttctatatatagagaagaaaccaaatcataaaatagaaaactctaagcaaaatagaaaacttgaaataaggaaatatgaaaagaaatgtaaaactgctaaatctctcctacatcagtctcctccacctctgaagaacttgtcctcaagttctcttctggataaaggaccccgtctgcatgatactcatgaatgtcagctacgttgaaggtattggaaatgttcattgatttcgggagagccacaacataagcattatcattgatcttccgcaacaccttaaacgggccatacttgcgaggctttaccttgttgtacgttccaactgcaaatctccctttacgaaggagcaccatcacatcatcaccttctttgaaaactttgaatctccgacgtttatcagcagcgactttgttctttttcccggtagcctctaacttagctttgacaacttccttaacaactaaaatctcttcagccatagtttcagctgatgcacttacccaagagcctttggtaacttaaccaaatcaaccacatgtacaacactgttgtaagcaaattctatttgaggcaaagctaaatcccattgctttggattatccccgcatatacttcgaaccatatttcccaaggttctattagttacttcggtttgcccgtcgatttgcgtatgaggtgtagaacttcgattaagagctgttccaaacatcctccacagagtagaccagaaatgacttagaaactttgtatccctatccgaagtgattgacttaggaaccccgtgaaggcgcactacctccttgaaaaatagtttggctatgttggatgcatcagcggtcttcttgcatgcaatgaaatgtgtcatcttggaaaatctatcaactacgacaaacacagaatccacaccccgttgtgtacgtggcaatcccaacacaaaatccatagctaaatcttgccaaatatcatcacgaatggtaaagacatataaagaccaatattttgagattgacctttgtgggttctgaaatccatactagagatttgtaaatagatttatgagaaaggagggctagatcttcacaagaactttgaaatttatattgctgaaaacgaataaacttttgtattgatgatagtagagcttttacaatgtagaatgagattacaagtgtaaagtataagtgtaagtgttaagctgaatgtatatgtcttccaagtcgtccttgcttccttacatagatctacgcacgtgggtagctccatccgagatccgcggggatattctcctggatattcggcaggttagttccgagatatcaggtccgctccgcgaatatctcctggtcagttcctaggttgttattcgcttatctcccttcatcaggtaactaggcttatcaggcccaaatacctaatctgttcatgggctccagagctgcgcaggtcctctacttggtgggcttagtgggctggcatgctatttttgcaggtggattcctggagagaaatccagctccaacatttgccatccagcccattgagtaagtaggcgaactcgatgaacggacacctaagccaagtaagattgcgaaaatattgtagataaggtagtagatacgataagatcaatcggttctgaggataaactcaatgaaaacggtataatcttagattcttaaaccgaaagatatcgagtagatacgcgaggtaaatcgcgggtgacgtggacggtcgagatgacgcgtctcttcagcgcaccgcatctaacggctcagatcaggcgcggggaagagatctctacaatctcaaaaatcgtggtgatgatggcttctttaaataacttcccacatctccactcgatttcacgtcaactcacacgactcccaaggtaacttctctccttctcaactatttactgcctttaacttttgtttttagagatagaaactctaacttttcttccgctatctccttcgtactttctctgctttctctcttctttccttcatatcgatcgtctctcttcttcaaaatcaagagatgagtgacttagacgattcccagaacaagagcaatcacagctatggcgacgacgatagttcgtcaaagatgaggtcggcggcgtcctcgcggcaggaacccaggcgcgtcataaccctaggcggaatgggtcctatccgaaggccatcgaccagagtcgacaagcctaagaagaagaaagctcccaagcaaaaggggagcttgccgatgacgaacaatgatttggtcgacctccagaggaggtgctagattccggcgggggtgactatgatactcccaaggtcgccgctgttacccaagaacgtgccggaggggtggggttgtgcttacgccaatttcttcgagaaatgtgggctgttttacccgattcaggcgtgcatcctcgagatgctctactgcctcgacttcgcctttcctcaaatgtgtccaaatttcgtccgccacgtgctggtgttatttatccaggcctgagaggtgaacagagaattcggctgccacgacctgctgcagctttgtcaggtcaagaccaacgccaggagcgaccaagggacgtactacataagtgttcgtcttggatctctgatcctaggtggtctgaaggcctgtcgggatacaaattagcgagccaaatacttcttcttcaaggtggacatcattcggtcggcgattttgacccagcaaggataacgaggacctggtcctctaacctgggtcagatggaaatctatcgttttgactttattgttttagttgtgtgtagattggtttttgttgaacattagtgttgctactaatatcgctcttcttgggattattttgcagcaagaaccaaagaaatcacttttttcgagacgaaactctatctgttgacccttcttcgaagttgtcaaaccgactggccaccttcaatagggatcgcaacgtaactgctctccccatagatccagcggatccagtgattgcccttccagcagcgcagccggatccactcgaagaggtcccacaggtccaaccgaaccatgtcgcagatccgcctataggtatgagtttcacttgttgtttttatttttacatataggccattgcgctagctacacaatcgagttactaagtaacaaacactacacttcatctgtttagttcctcccgattccagctctacttcagaccttccgcttatttccagaagaagaatgaggtgaccaagtcttcatgttcaacgagccaatgcgggacctctgctcgtgctggtgacctgtcggccgtggtggccgcagctcgaaccagccttgctgcctcacacactcaagcctcaacgtctcatccttcacttcctgcggctaacgccagacctctcttgcggcgggtcgggcaaatagcaattagctggccgcttaggtctctgagccgtctgaagctgttagggcttacggtgcaccgtcttcttcaaagagagctcggctcctgccggtggtgcgcctgacagctgagctgatcgtgattgatcaggaggtcgccccttcaagagaagagagggtgaaacccttggctgctaacccggaggctgctgtgtccgtagacaggcgatcatcgggaaggtcccaaggcagaggccgaggatcaagaggtaggggtaggtcttcctctcaaggtccgaaccggtctcaggaggtgaggcagacgtccaatttaggtggaggatctgcaggaaacaggcctttccattggtcttacactcacgatcgtgatcatccgatcatcgaggacaaggctgggttggcgaacctgctccgacacatcaaagggaggaactgtcaggttcccggtgtgaagaacatggcctaggcggcggcttatgctgacatgatggcgaaggagggccatgtcataatcgattactgtctccttctatttttatgccagttttaatttctgttttttttcggcaggcgattgctgctataaacaagttggttgctctctacgagcaacgtctaagcaaggatccttcggcgagcgagctcgaagaagggaagatcctcatctaggagttgatagcgagcgtgaagtcaggtcaggagcgcgaggcatcgttccaggtatgcttcggttattattttattgtatattttttattgatgatgtgatgattctgacctggctacgtttccaggcgtagctcgacaggttgaagatggagctgtccacctcgaaagatcttgagaaaggttatgccgagaagatcaagatcatggagcaggagttcagagggttggaagcagataagcagatggcgaggaaccagattcatcgcttgaatgaaaagaaggacgagctctctaaaagggtgttggacctcacttcgattgcgcagggagtgaacaaggcggttcacgatgctaaggttgaactggctgcctcgtattcgaagttgctaagtgggatcaaggataagtgggtcgccaagaaagagttcaccgtgctggaaagtcaagcagccgaggtggagtcaaacttggctttgatcgatcaaatcgtgaaggctgctgtcgacctaaccgtagagaaacctcggtttcaagcggagatagatgatgtggaggcgaggtgcacattaaaggaggtgtcggacttcactttgagcaagctggatatcccggaagtgtcggagatgttagtggtgcgtccgatgaatgtcgatgagcagggaacgccgattggtttggacgagttcgggagcaacaaagatacgtttccgcgaggtctcgaggaggatcctggtactgtctttgccacgccggccggggggtcgaaggagtgtcatggatagcatcggcctgaatttaaaaagggagatccgttgggaggtgcccgtccgtgacattatcatttgggatctaagcaggtacgttagatctcgttaaagtggatgaactgggatccatgatcgttgtcacaattgatttattagttttggtgttggaaggatctatttccgtccccaaagacggcgccaaatgtgggttctgaaatccacactagagatttgtaaatagatttataagaaaggagggctagatctacacaagaactttgagatttatattgctaagaacgaatggacttttgtattgatgatagtagaacttttacaatgtagaatgagattacaagtgtaaaagtataggtgttagtgttaagctgaatgtatatgtcttccaagtcgtccttgcttccttatatagctctacgcacgtgggtagctccatccgagatccgcagggattttcctggatattcggcaggtcagttctgagatatcatgtccgctccgcgaatatctccttgtcagttcctaggttgttattcgcttatctcccttcattaggtaagcgggcttatcaggcccaaatacctaatccgtacatgggctccagagctgcgcaggttctctacaggtgggcttgttgggcttagtggcctggcctggtattttcgcaggtggattcctggagggaaatccagctccaacaaccttttgatacctgacatgtataacaccttctgacaatagttccagcatctcttctcaaatgtggccaaaaatatctcccttccagactagcaatggtcttgtctttacccaaatgcccactaagaccaccccatgctaatctgggatcaacgtctctcttagcgatgagcaagggatgcacaatcgatctcctttgaataagtagccttctcggacatgaaaatctgcagaaggatgcttctcgtcgcacttagcccaaagttccttgaattcaacatcattttcatacaaatccttcttaaactcaaagctataatctcttatgctaaagtaagtagcaatgacgctctcttactcaatgcatctgccaccttattaagcgcgcttaacttatgctggattataaaagagaatttctgcagaaaactaacccaacgagcgtgcattttgtttatcaccttttgggtgtgaagaaacttcaaagcttggtggttagttaacaaaatgaactctctctcaattaaataatgctcccacttccttagaggtcaaaataccgcatacaattcttgatcataggtgctctatttatgttgagcttcactcaatttctcgctgaagagagccactggtcgtttttcttgggacaggacagcccctactcccacaccactagcatcacatttaacttggaacactttatcaaaatcaggtaatgctagaactggtgcggtacaaagcttctccttaattaaatcaaaacttttctcttgctcgataccccaatgaaactttccttttttcaaacactcagtaataggaaaagtaatattactaaattctcttataaatctcctatagaaggtagcaagaccatgaaagttgcgtacctcactgactaatttggggcaggccaatccctaattgctttcactttatcttcgtcaacatgaattccttcttctccgacaataaaacccaaaaataacaacttattggtgataaatgtacacttttcatattgatgtacaatttattctcttctaaaacttgcaacacttgtctcacatgctccaaatattcttctttggttttactataaatcagaatatcatcaaaataaaccaccacaaaagaacccgtaaacggacgaagaatttgattcataagtcgcatgaaggtactaggggcgtttgacatcccaaagggcattacctgccactcgtacagtccatctttgctcttgaaatctgtcttccattcatccccaggtctaattcgtatctgatggtatccactgcgaagatctatcttggaaaagaccttagaaccacttaactcgtcaagcatgtcgtccagttgaggaattgggaaccggtacttgatagttatcttgtttatggctctactaccgacacacatccgccattggttacctttcttaggaacaagaaggactggtactacgcaaggacatactctcacgaatgaaccctttcctcagcagatcttcaatcttttccctcaatatctcattttccttaggactcatacggtaatggggaagattcagtaagcttgatcctgggagaagatcaatctgatgttgaataatgcgcataggaggcaattcctgtggtagctcatctgcaatcacttccttgaaatcttttaaaagttctagtacttttgtctgaatcgatttgtctttttttcagcactcatcaaccctttaatcactacaggacatatacattcaatttctttaattgcttcatcaagctctttttcactttgtgtcacaaccaagaaattagaatttttcttcactagattctgatcaaagtgtgaaacaggagccataacgatcttatgtccattccatgtaaacattaacacgttgtcctttcctcgatacgtaatatcattatcgtattgccaagaacgaccaagtatgatgtgacaaacatccatgttgagaacatcacaaagaacctcttctttgtaatgcttaccaatggagattggaaccctacaagacagtgatacacaaaattgagagcctttgcttacccatcctaaggaatatggcttttgatgtaacgttgttggtaacttcaagtattcaaccagtttctgagaaactaagttttcactgctaccaatatccacaatcaagttacacactttgtcgttaatagaacatcgtgttctaaacaaattccttcgctgtccttcttccttagatgataataagatcctttgaagtacaagatttatcatctcattcgactcttcttcagcaaattcaacctctgcatactcatcctcttcttcaagttcttcttcttcctctagaaaagctacagttctcctactaggacaaacactcgatctgtgatcttgtccttgacagcggaaacacttgtcgatggatggtctcgcataagggttagtttgcttctggattgtgttttattcttctcagcattattagaaccattgttaatattactagctcctctgttaccaatgttagcatctcttgtcaatacagtcttctccttatcttctgttacttctgaattattttggggtgagtatcttctaaacggagtaaaattacaggcagatttttccattaactcaggtttcaaagctagactagaagcttcttgcacaatccaaacagtttgaagacccatcttctctttaatccactgatgtaccttgctactttctgattttctgtctctcttagaacattacgctcagaaaatcgaaggaactccaatatacacattcaatatacatcttatagagaatctgttcatagtcctccgacaataacctttccctcatgagctgtttcattcacctccatgttctcactgccccatttctttgtctttgtctttgaacaacaagtgtatcccaccacacagcagcaatactctctaatctgattgctaccatcttaacttgcttcttttcagggatacccataacctcaaagaacctatcaacgctgatttgccaatctagaaaatcctcaactccaatagtactatagaacaatggaatgtcaacctttacacggtaatcatgactattttgttgattcctttcctcaacttcttcctccacaaattcctcttcaacagaacttgaattttcattgataataacacggttatccactcttgggatttcttttccccggtttctatgctgatttttgttaccataattgggtctctttctctgcctctgcgttgattctcgttaggatctatttgctcttcttctctgccgttttgctgattattattgttgttgacgtttttgagctcagttgtcaaagccatctgattggtcattgcagtcagagccgaggtaacaacctcggtaaagccctgaaggtctgctttcgtcaatgattcatctgccatagctgagacaggagaaagcctgctctgataccacttgacgcagtcggaacctctaggaatagcaagcactatgcctaagtaggaataagtttgcaagcgtcgaacttgaagggttgaaactctggaaatccatcaaattagagaaaaactctctgcttttattaattcgaatgaaaaacatgtccagcaaacaacttagggtctctctctaaagaaaccaaaacataaaacagaaaactctaagtaacatagaaaacttaaaataaggaaatatgaaaagaaatgtaaaactgctaatctctcctacatcaaatacaagaggtggaatcattgattcctacgtgatttgttttttttgtcatcgtattatcaaatcatagcctgattaaccggttgaaaaacgtgattcttttcttttaaatttataataatatttttttcatttaattgtaagtaatcttgttgaaatttttattaatatatgctattattgcattttaaattttaaaattactagagaaaataaaaacaccgaattgtgtagttagttatagattaagaaaaaaaccaaaaagaccaccgtcttattttaatttgtccgtttaatacttttttttaacatgttttgtccctttaatacctacattattaaattttcctgaaaatacctaaattaacttttttgtctttaaaaaaccttcatttattttttaaattttggcaaaatcagttatccgaattaacgaccgttaacaatgataacggaatgctaattgcagttaaaacttaaccctatggtgtttatatacaatttcttttctaatagttatgaaaatattatcgtagtcaggtggttatgtgagagtttgatatccacttaaacatgagttcaaatctatcctctacctttttttaattctctctctctctctctagaccatcgttctttcaacgccggcgaaactatttttgtttaacaattctcttggtacgttaattaattctgatctaaagggagcagagaactcttttagcaaaatctctctctcctcttttcttaaattcttttccagatctcattttctgattttttttggtcttacttgcaagaagtgatctttcagtgaaacacggtggtcgacattccttccgctccgacagtggctatagtcgctggaaattaggtgtgggactaaaaaaaagtccaaaaaatggtcgaatatgatagtcgaacctgtgttcagatgggtattaaactctctcacaaccaccttactacgaaaataggagtaagttttagcgattccgttaccactgttaacagtcgttaactcggataactgattttgccaaaaaattaaaaaatgaagaattttaaaagacataaaaatcaacttagatttttttgggcaaatttaataatgtaggtattaaatggacacattaaaattagacggttgttttttcgggttttcccccgttatagattacaaaattcattattaactcatgccaaccattaaatgactatttttaattagaaattcattttcaaaatatgaatgaatgaatggtatttcattaaatataaagaaacattattcattcttacatgtttcttttttggaatcatgcatttcttttttggaattaaaatgtttttaagaatgaatgcatgcatgtacttaaaaaaagttcttcatagttggttttagatgaaaattcagatacatttaaatgttgctatatacaataaatcgctaaaatagtaaatccaatgatttgttacaaattagacttgcctcaaaccgaggaagtaatatatatatatatattcttaaaatgtgtgcattctatattttgaaaccgaggaagtaatatattctcaagataatatgttactttaatttataaatctcttagttatcttagcaatatttatgatttctttgatccatccaacgggcagacaaaatgatctgcgtaaattatatcatgtagtaagtcagttttttcgctgttatacaatgctcttattacttcaacatatgagggaatttattttatcggattgactttgaactagttattgatggatcttggttagactgtttaaaaaagtaagccatgaatactttcttgcagaattgatttttggaaaaattggaaaaaggatatctacaataaaatttgcccatctattccttattttagtagattggtcaaacatgtgtttttcaaaatttaaaccctaatttatcctcagtttcatgtataattaataaaaattaaaatttcctaatttatttacgaaattcaaatagaaattaaaaaaatctcaaatcctccaaatgaattattctttcacacaacctagtaaaagagaagtattttttttttcctttccggtgacctcaacccgaaaaaaccccaaacctctccgattttctgtcagcctaaatctaaatctctcgcagatatcctatttgatcgattttcaaaatttaaaccctaatttatcctcaatctctcgcagatatcctatttgatcgagttaataaaatcgattattgttgttgtctctgtgtttgttgttgttgttcttcctcctagaagcttcatattggtttgtctttcttatctctcttttcatctagtttaccctcttgtatgattgaaattatttctgcgtattctatcgattgattgaactttcagcaggttaatctattagttctctctattttgtctaatttgcaagtctcaatttcaatttgcatgtagatttggtaagttatttgaaagaaaatcttattgttttctcaatttctaacaatttacaagtcgacgttaagtgtttgcatgtagatttcatgagttctttaaattcgtgtaacttgtttaaagatttcaattttctgtgttttaaaactcttaatcttagtggcaaatcgatttactaagtctgatcatataggtctttgattcatattagtaattatgtgtttggttttgaatttttggattaatacatagtttgatgaattatgtttgacatagtcgttgtttcgggactcattatcttttagatctatatgcttttgtatgtgtgattctgttgagtttcaaagtttcagtaatgcgttttacaaatttgtgtgaaactcttagatttccttatatctagttaagagtatatattcttatttttcatctgagtggttgcatacaacgttttgtttatctgctaattagacacacattgtatatgccaatttgtttacagtaatgaaacaacaaatttatctacaccatgtgtttattagctagatgtcccattttagaaaaattagtgaacgaaaaaataccaactagggtttattatcagtcaaatgttcaaacataaacactattgttattgaataatataatcgatattcaaaagacattcatagtatataaaaatcagatatttaaaaagcttatacagaaccttaataatattacatggaaggtttgcgacaataacaatggttcaagatacatgtataagcattttcaccttttgccttgcaatagtcaatgcaagcagccacaccataattggtatcactcagtaatgtcaagagttctttaagggggcattcacaaccaccgctcacacatttgggggttacaaatggcgttggacatttgaggttaacacaatcaaagttagtcttgcaagatacatatctgattcgtaccataatggatgtacctttaaaaaccatataattgatttatatattcacactcatgatataatgagaaggatgaatatggaatacaattggaacataaaatttgtcttgaaactcacacgttgaaagtagtagaacaccaatgaatatcttagctgatttctccacttgtgtgtgtgggcaatgatttataaagctccttactctccaaaaatgagtctaaatactttcttataatctgatatactcttatactctgaatgaattttaaaaatccttgtttacccgtacccgacgaaccggacgaagcaaaccaattatggtttactctccaaaccaataccatttatttaatacataaaataaaaacaaaattaaccaataaaaaaatctccagaatttcttccctcatcgtgtccgacaaaattgaaatcgacgacttgcagccatcgtcgaatcctccggcgttgaatcaaatcgaccaagctcgccgtcgtttttcttccgttattcaaattgagctttaccattctcttcttatactttggacatcttaattcatctagtcttgtgttgttgtgtttgtactttgtagatttcaattagatttgataggtttgaaattggtatttgaaactgatggatattatgttggtaactatgtattctcggtctattaagacattttaatgtactgtaatggttgattcgtagttaatttaggcagattaatgcttttagtcgaagaatcaattttctagaacagaataatttaggtataactgagaaacgtggtatagctgtttgaagtactatttatggtataactggtatttctgaaaatgagcgtggtatagctgtttgaagtacaatttgctataactgtaaaatctaggtatagctaatgtttttttttgttttttccaggagaatgggcataatcatatattttgattaggatggatattattcaaaatccggagaagcatatcaatggaatccaaaaatagttggtttgtatggtatattgtttaggacaacatcaatggaggagataacttactcgcggttagtggataagatatgcacgaagattaagatagatgaatctacgataaagctaaaattgagttacattccatcgggtgttaaacctcctacatatttatatattagggatgatgatgatgtatatgtttatctaaccacgttggatgaagagaaaagtagaagtgtcttgcatgtagaattcggtgatatgtctatactttgcatgatttagacattcattcttcaccactttgtcactgtttcatccacatttcatctcattaggagtcgttttagtgtgttttgctacataagacaattttgcattaggattgcatatgtgcattgcatatttggttcttttcaggtactttgcatgcttttggagttcaaaaagaggagaaagagagcagaaagtcagaatgtccaatgacgccttcagccaaagtactctatcgcagccttggagccctgccagggcaaatcactctatcgcaattccggagaagctagcagctcagttttactcaatcacgaagccggaggaatcacccaatcaaaaccactcgatcgccactcgaccaccaggaggcctatctgctcgttctgcattcaaccagactagctgagaattaagaagagaagagaagccgaagcaaccactcgatgaacacctcatgacatccactcgatcgcactcgatcacagggtcgctagaccattccatctcgtcttcacttcagatcactagatcaaagcgaggcacatttcagcccatcagatgccaatgacataccagggaggcccatttcatcccatcagatgtcaatgacatactcgatcgcaaggtcccgatgtgaagactactatatgtgaagactactatctcaaactttccttatttgtttcattttcgcttatataagtagcctctaagggttttccctagggcatcgattatccatccaacttttatctttcgcaactttcgtagccgcagtgtttctcctgcgtctttgtattcactttcaagtatttgatattcagttttcgttttaatcctttatcatttcttttatcatgttttcaatcattgctttgctatgtcttcgattctgtctgttttcgttttaatcctttatcatttctgttatcatgttttcaatcgttgctttgctattgtcgttgattatgtctgagtagtgaaccgtatttctgaggaagggatagtgtagttgtggtttacttggtcgttttagttggttgagtttagaatactagaatcccttctggattagttgcgcttactgcttgttcctttatgatcaattggaatatgaatccagacattcccgcgctcaaaaggtgttcgacggaatgttggatctattaattccagagatactcgcctctaccccaaggtattggctgtgtagagagggtattggctttaacaagttgattttatattgcttccttagttagagatcgctaatggtgattcggtcagtgtctagctctgcttgaggattcttgtcacggtggtgaagtaatctgttgttgaacttgttgtctagggatagcttctatgaagttttgtcaaccgcctgaatagattaaggagaccacactattcgattaccccatccttaggaatcgtttgtccatttgattgtctgttatcatttcagctttattactcatctgcctgctattgccattttttattttagtttcatttcatttctgttattgcatattaggaatgttagaaccaaccaactctctacttggcttgacttagagctttctaatcatatctcatctgtttgcatcacaccggattggattgacaacctaaaatactgcaccgacatgattagtgttttaggaattaattgactaaaatcctactatcaatttggcgtcgttgccagtttggtgtttgtttgctatatttgagatcattagaaacgttaagatcaagtttgtttttattacacaagttactaacattgtgccttttctgtctttgtgtttcaggtaccttgcaacccgctttatagacgcatctctgattcgtctgttatagccaggctgctatctgttgcatgcatacacggtcacaaggaaatcagaacctcctattcagataacatcgatcgtattgctcgccaactgagagaacagacagacacagaaacaatggctgacgttgtagatgagcaggagcaacctaccaacattggtgctagtgactttccacacaaccacaaccagcgtcatggcattgttctacctctagtacagaacaacaactttgagatcaaaagcggtctcattgcaatggttcaggggaacaagtttcatggtctgccaatggaggattcgctcgatcatcttgacgagtttgaaaggctctgtgaccttactaaaatcaatggagttagtgaagatggtttcaagtttcgcttgtttccattctcacttggagataaaacccatctttgggaaaagacgctaccccagaattcaatcacgacctgggatgactgcaaaaaggccttctttgcaaaattcttctccaactccagaactgcaagactccggaatgagatatccggattcactcagaagcaaaatgaaagcttttgtgaagcttgggagcgctttaagggttaccaaaccaaatgccctcatcccggatttaagcaagcttctcttctcagcacactctatagaggcgtcctgcctaaattaaggatgctgctagataccgcttccaacgggaatttcctgaataaggatgttgaaaaaggatgggagctagttgaaaacttggctcagtcggatggtaattacaacgagaactatgacaaaagcatcagcaccagctctgaatctgatgacaagcaccaccgagagattaaagctctcaatgacaaaattgacaaactcctccaagtgcagcagaagcatgttcacttcgcctctgaacacgaagtcttccaaatccaagagggggagaatgatcagtgcgctgaaatcagctatgttcagaaccaagacggctataacaaagggtacaacaattatagacccaacccaaatctgtcatacagaagcacaaatgttgctaatcctcaggaccaagtttaccctcagcagcagcagctgaaccaacccaaaccgtttgtttcttacaaccaaagccaagggtttgttccaaaaccgcaatttcaagggggataccaacaacagcaaccaccacctggtttcacaccacagcaatatcaagcctctacacctcaggaattagacatcaggaatatgctccaaaagatcatgcaaggccaaggcgcgggggtaatggaagccgctaagaagctggctgacttaaacatcaaaattgacagatagttcgttgaaatgaatagcaagctcgaatcattgagcacaagggtacgatatctggacggcatcaccgcttcaccacctgttacaaacaacccatgccaggtttcaggaaaagcaatacaaaaccctaaggagtatgccactgcccacgcaatcattatcagacatgatcgagagctgtcaactcaacatgtctctacatcaaacactgaggacagtgtaattcaagaaggggaggcttccgttcagattgaagtctctgttgctgagatcgactatgcagctcaaactttctatcaggctcagtctgacttggaggagaaggctactataatcgagagaatggtaaaacgattcaagccagctccatcaccttcacttgctcttccatggacgttcaggaaagcttggaaaagcatatatgaatctctggcagaaaaacaacttgatgagatggaatctgtgatgcccttagtagaagtcctcaagttgatttcagaccctcacaaagatgtgagaaacctgatactggaaaggctcaacatatatcaggattcagatgacgaagaagatgtcattatgcatcaagccgctggtgagaggattattcaagagaagctggaagatcctggatctttcactctgccatgttccattagccaattgactttcagcaattgtctatgtgatctaggagcctcagtcagtttaatgccactctctgtggcaaggaagctgagattcgttcagtacaagtcctgtgacatcaccttgatccttgctgatagaacttcaaggagacctttcagcattctagaggatgtgccagtaatgattaatggtgtcgaggtgcctactgattttgtcgtgcttgagatggatgaaaagtctaaggatcctctgatcttaggaagacttttcttggcctcagtgggagcagtaatagatgtcagatttggtaagattgatctcaaccttgggaggcacgacaagttacagtttgacatcaacaaatctccaacaaggtcaccaacagaaggaaaaaccttagagatttagagagcggttccatgtgaaggccttgagatcacaatggggaaggagcaaaatttagttcaaactcagccttcgaactcgactactcgatcgagtataccctccacacttgattggctggagctccaaaggaagactgatctccaaaacgggaacattcaaaagctgaacttcacagttgaaaagcttagagacaaactgagtcaaatgcaaaaggagggttaacctcagctcaacactgataagatttcaagaaagaagatcacctcgaattgatctgaagagaaagactatcctctagaggaggaagcggcttactttaaggaaagaggaattgaatactcagctgtacaactgtcaagggaggattctgagtatgatgttgagatcagtgaagaggaggacttctcaagttctctctatcacattttctccacttaattagtgtgaggagtcaagctagagactctaaacaagctcacttgggaggaaatcccatgactatccctgtatatactttttatttatttgttacttttgatttgttatggttgtgtctttgattctctggaaatgaataacagctggagtgatcaacatggatgtgatcgagtgttcaaatgaaaattttacaaattttgataaaatactcgatcgcaacataggagtaaaagctcggaagtgcgatccagcggttttgagataacaacttcatcaacatcattttcaaactactagatcgcaaggaggagtgaaagtgtccgcagaacgtcaatgagaaaccttgctcccataaacttcactggatttcaatctccaccgaaactccaaaaagcccatgttgtgtccctttgtagcccatgacacgaaattaaaggatcaaacggcccatgctcgatcacaaggtgcgtgacttgaaggaaccccatcctgccgacagaaagaaccatgctttgtctccttttcacttggcgacatcataaagagcattctatctcatccgtccgttcaaaagcgacacacctcatccacatattcaaatcgcaaagggagataagtgtcactactcttcacttttcttcatcacttgtgatttcaaaacatctctcttgtttatctctctacttcactactaaaaacgctctcaactctttcattgttgcaagctgttattcactaaaacagaacctcaaaaccagtcaatcgcaacttgtctctcctctgcttgttccactcgatggatgccgactatagtgttgatgaagctgaatcttggtcaactagaccaaaaagagaagcagaggagtataggcgatttgtggcggaaaaaaagcaagcagtcgccaatgacaggagaagagaagagatcgctagagggaagcggtcaatgacacagaattatgagctagtcgatgaggaaatggaagatcatgcagactacattcgggagccaacccacaaaaccaccaagtctttgatgaaggaagacaagctgactccgggagactactacaagcttctcaagagatatctgttttggggaacaagatatcctcacccggagaccatggcggagttagcatcctggaggacgttcaactcttgttcaagaagtgccacatgacaacactcatgtctcatccctttcctgcctataaggatgagacactccaattcctttcttctcttcaaagaggaattgtttgaggggttgtcagctgctgagttgagagaaggcgggcttgggtacttaagcttcaccatcgacggccgtgactacatcatgaagatcaagacgctggaaaccatgttcgggtttcccagtggcaagggaacaaaaccgaggattatacgagaggaactcaaagccttgtgaaacacgatcagagacactaccatcttcaactccgctagatcaaagagcaacttcatccgcaatcccgccattcgctatttccagagagcctttgccaatgtcccttacgctagaaagatatccgccactgtgacgaaccaagacatggagacgttagacctggcgttgatgagtttcctccattacaccaaggacggaaaaaatatgaaacgagatgccaatgacacaccccggtcaatgtatctcctcaatcacctatgcagctacagagggtgggcactggccaatgacaggaagaaagaggagtggtgacggcaatcctcctatcgtgcgaagtcccgctgcgatcggatcctatcgaaccatgatggatggatatcgcccatctcaagcttgtccatgtgatcgagcatcaagtctatgacgagaggtacgttttcaagttcgatcacccgtcaacaagagaagcgactattcttctccccttcagtgaaatgacaaccatcacggtgagagaccacatcgacttctcgccacaacatgaaatcctccatgatgtgattggaggatcctcgtcccagaaagctaaagaagtagatggtcagagtgaccatgaggagaccaactgggaaatctatgacactagccggtaccactttgaagaacacaagcccccttcacgagaaagcaagagtcttgctgaagcacacaagaacctaagtctaacccaaagatggtgcaagtttcaagataagatcatccataaatgtgtcaaggccattgacaacatgcagaaggcactcaactgcaccacatccaccagtgcgatcaccaaagacaacccgccagaagacatgccatccaggcgtcatgacattaccccgccaaggcaatctgcttatcaacagagagaacgtgctgccccgcaagaacgcccaagacactcgtctcacgaggtaagggagcacaaaagaaggaaaagcgctaggatggtccgatcatcaagcaagtgtcggataatgtcgggccggagaacacatgaacgtcatgcttgatatgtctataatttgcatgttttcagtgtccattcatcatcgttttgagtccagttttgtatcattcatcactgttttatatcatttctcatcattcttgcatactttgcatgattaggatagctttgcatacatattgcgttgctgagttgttttcaggtgatttggagttgtttgcgagcaaattggaagaaatgagccagaaccagaagacatactcgaccaccaggtcgtgtgcatccagcaccatactcgaccccctggtcgagtgactatggagccattcttcccatctactcgatccccaggtcgagtaacctcagctcaggccactcgatgacgcaactcgacccctggtcaagtatcacttcgccacaccacctgaccacactcgaccgttcactctaccacgttactcgaccccctggtcgagtatcatcactcaccaccaacaccatcactcgacttggcactcgatcacatcttcatagtctactcaaatccgcactcaaccagacaagctgagcacaaggaagagaagaggagaagccgaagtgtttggaagcagcctggacctccattggatcacgaagcccatctcggcccattatcattctatgggccaggcgattaggttattggcccgtctactatcattttattttgttttgtataaatagatgtcttagggttctgtcctgagacatctagtcgacattgagtttttgcttcagttttattttctgttttactctggctgcgccgcttttgcttctgcaacctgtaattcgagatttttccaagttattcagattccgcatttgatttcatctgtcatcttgtttctctactctttatctctttacttatgcaatattatcatttacctgcgtttatgtctttgagcatgttgtctgagtagtgacttagaattcttaaggatgggatagagtaattgtggaatccgtagtctgtagaatggttaagttttagaattaattgaatcccttcaactggaattcgatcccaagcattcccgcacccagaaggtgttcgatggaatgcttgatccactagttcctgagatattcgtctctatcccaagggattggccgtttagagcgtttattgactttattagtctgttcttattgcctgaatagttagattccgttaatgggaatcagtctgggctagctttgcttgaggatttctatcacgagagtgaattgatctgttgttgaacttgttgtctagggatagcttgattgcgcttgttaaccattcgaataggctaggataccactttattcgattaccccatccttaggaatttctcgtttatctgatttctctgttttatcgttatcgcttaatcgttctcattgcctgtttcttcgtttttgcaattactcgaccaacttacttgaccacacatagtgtctgggaacagactgtgcagtcgagtacagttgtctcatttcctgtctgttactcgaccagtatactcgaccacacccagtgtctggcaacagactgtgcagtcgagtatatctgtttcatatcatgtctgttactcgacctgttactcgaccacatcccacttatggcatcagcctgttgtggtcgagtgattttagtaattctgttattgtttccgttttctgcatgttcgcttatgactgttagaaaccccaaaactgttatttcttggcttgacttagtgacttcttatcacatctcatctgtttgcatcacacccatttggattgacaccctaactactacaacgacatgatagtgctttaggattaattgactaaaaacctattatcaatgctccacaatctattggggttgcgatcaagcacaatgacgaggagatggcggagcaacatcgagaaccggtcatgtctgcggagtacactcaaacagatatggatgactacatctccaggacattctattgaggtaacacaccaaaaccctttgtaaatatcgcttttgtttttgcttttgtgtttatcttgaattctttcacaaattttgattacacaagggactgtgtaatttaagtttgggggagggttcaagatgtatttgaattatttttgtgaatatcatttgagtctgcatatcatctaagtcatagaaaaaacaaaaaaaaaaattaaaaaatttgaaaatgaattccacaaaaacagagtgatcatttagttgcattacatttagagtcgagtctagagtgtttcatataggattgttgtatatgcataggggataatgaggagagaaccttgtaagcatgatgattcattaacatgagttattagttctccgatgcatttgaatgactttaaagtaaaactgcaccatgttctatagaaaccactcgatgtatgtcatgacacctttccctgtcaatttgaacttgaatctgacttataattatcatgtttgcatcgtttttgaactcatggatagaatacatacttggattttctttcacttattttccactcttgctaatccaagtagctgcttctattattagagtagttcccccacccgattgagcttggtaaaacgtgttaggtttgagccgacaagagtagtatctcatgtagtttcaatccgcgttttcggacttggtaggactaggtgggaacttatgtgggaattgagattgagtgtgaaaagatatgaaagaaaaaatgggttagagtctttaggagaaggaagctggaaatcatattgaggtctagtgaatgtttgggaagcatagaatcgttaagatatgctctaaaaaaaagatagcaacaaaaacagaaaagaaaaaaattataagagccataagagtttaagaaaacccaatgcactagactagactcatagagtaagaaaagcctctccttaagaacaagagccagagaaatgaaaggaaatgagttgatccaagaaagaatcaaaatatgcatttagtgcaaaagggtggactgaggctcatcattgggtttagagataggaccatgtacttgttattcacggtttatgtcattgggtagatgggatgttattcttgtatgcataggttggcacttacctttagcattcttctaaagatcaatcctttttcactgagagtctcctgttattaaaatctgaaccacttaaaagggaccatctttgtctcataacctatccttagccaaatgagttcactagcaatgcatatcttgattcatgtttttgaactaaatgaatgttaaggggattggttgatcttgacgcattgagcaattgagtgtagttttggatcataacagagcatggctaaagtttttaagtagaagtcgatcacctcacgtcttaaaactgttaactggtacattgatcttaattatcatatctcatggtttggttctgagtcccagatgcgtgttttattttgcctcaggcttttacctgaaagatcacacgactactacaagtgcacaatatatcagagtagtactttaggatcgaatccacaaggagagaagtagttcagagaaatccttaagaagagagtgaagctaggaccaaaataaaagagaggggttgttgtaagctatgagtaaccaaaataaaagacaaataactaaactaaacggtaaactataagagagaagcattagatcatcggaagtttctccggatgtcaaggttcaataataaggtatagatctcaatctaggtgataacatggctaggtttgtttacttccaaattctcggacatacgaaactctatcaagaccagctaaccctaacggctagtaggtgaaagccggttattatcactattatcttgcgtactcagttgccttatcggctattaggttctaacatggtttcaaaatacaagatcaaagcattaagttcaaattcaattctagtccataagtccctatcactcggcgggcgtgcaacggttatagttctttattcagtttatttagatcaagcattcaaacgagattttggcaaaaaatgaaatacctaaggtcaagtactaggtggcgttctggacatacaagcattaagcttaaactcaactagaaggaatagtgtaaacggtcaaacaaagccatagaaaccgccaacctagattttcgatctgttggtccccatgaattcccctttgaaaccccctcaaacctgactagaaatctactcgctcatggcaaaggagctaatcaaaagttgggttgagtagaccataagtaaaagatgaataatacttaaaaggggtttagagattatttctttgaatgtagaatacaagaggcaaagctccaccttaaagagtcttacacgaaaacgagaaagagaaagagagatggtgttcttcaaggttcaagaggtgcggcggcaacctaatggtcggtggtgagctactaggagctgcccgggttcaagtctcatcgtccggatgagttttggacttattatttccaaacagacgattcttgacatgtcttcactcttcgggtcatatcttttgaacgcatcatgaattgtttagattagacttcgacgttaatcttgactcttttagctttcaaatgacaccgagatatcctcatgccgagattgggaagaccttggccagatgctaaacttccgaagcactggaatgatcgtcttttgatacttttagcttcaaaattcttaaaaccttcttggcacctagaatatgtgtttctcttcttattggctctagaatgacatcaaatgctctctgaaacatacaaaaacaatagctaaaacggactaaaaagccgtgttatcaactctccctgacttagactttgcttgtcctcaagcaaacaaaagaacaaatctggtggagaggtttgaaaattgcgggaactcttctgttatcagtgaccgtgtctcgaatatatcctacaaaccacattaaacaaaagttgcgttagaacggtcgctcaatagtcttacgcctttctcatccttgtccatccgctttgatcctacagaactctgaattcacgttaatcaactctttacattctgtaaatgttttggcatggactttctcattagaaggtgtcatttggggtagacggcgcttggtatgaaaggggattttggtgtttaagtggtggagttaaagtgtttagggttaccgtatagtctcgaatgcaagataagttgcaaaaacgcaagagagaacggaccggttgaggtccacagttttcaaccacttcttcttttaaacaccttcttctcctttacttctttcttactttcggttccctagagttaggttttttttgaggggactctcttctgtaattggctcatctctcctttaggttcccatgtctttccttggaactaggtactagactctcttggttgtaatgtttcctttccttccttttcttttctttttcttcttttttttttttaatattcttttgtatctttttttttatggaaggggaaacagaacttctaaacaccgagtctaatgggcatacctttgaattggtttcaagggagaataaactcttaggccgcttgttgcaatctcttcttttgcttccttcttctgtctttgtggcgggaaactgtgttgttcctttctctctgacgtttttgcacatatctgctaaatgaaaaaggaaaagagaatgcatgaggcttggaaagaggatatagtttaagggtacgaaccactaaaagtgagtggccattcaggatcagcaaagagtggtaagaagggaaaagaagtcctgaatgtatatgctcgtttccccgatctaacacccattcatgagaaagaattaagttcaagttaatcgtccaatataggggagagttgacgtcggatccaacagaaatttctgcaaggttaagcttctgggggacggtccgggcgtagtgttcaaggttgcccgttccttgcgaccctgtaagtgttcctcaagaaacaattctcaacacataatggtcaataatcatcatataacaaggtctcagttccctactagttttgactcaataaaacattactcgataataaagaaaaactttttgctttgttagaacatatcggtgtaaaaagtggaaaaatgtttcaagtcaacaaaatagagagtagcattagtagtaatggattcattaatcccccagacttacttcacaccgtccctcgtgtgagaataagcatagggattaatccgtgagaaagacaagttaagaacaaagtcaccttgtttgtggtgactaaccggatgatctctctccttgcttaacagcggccttacacgatttagtatggttgaattccatgatattaatctccattcccatcttccttgaaacaaaaacctaaaaccaccaatagctttaacaaaataaaataaataaaaacatacctaagatagattgatcttgttgttgtcaatacggccacgaataagatcaaattcgtggtgacggatggtgtgaatggatggtaaggcagttgcgggcttggccgaaagagtggagtgggtgggtaattaacggccggttgttggatggggtcgccggtcgttgggattggcggaatagtcgcaggttaaatgaatcccttggcggaccgatcgcagtggcggtgcaacttcccttattcattcacgtgttggccgtagttgaccgagtcttggccggttgagttcgcattcggccggaccggcgggcaaggtgttgccagggccgctaggtagggcaagtccggcgaacgcgtggcacagtccggcgggctccggctagtggtcggggcgcattggaaagctccggcccggaagactccagtcaatggctggcactgccaggcggactccggccaagtgatggtgcaaataggcggggctccggccaaggtttggcggggccgggccttcttttctaggcggcgccgtttactcgggcgagtagtcggaccagttgtcacggcgcctagtgacgggtccaggtgacccttattccttctcttctttttgggtttttctgttttctatttttctattttttaatatatatattttcttaataagaatctgaaacaaatactaaaaaggttaaagcaaaagcaaaattaaaattctaaggaaaaaggtagctacctagtgggttgtctcccacttagcgcacttgtttagcgtcgttggctcgacgtttgggttttactaggcgtagtaagacgggttgtttcgcccttggcgagctctcttggattggaactcctcggggggttcttccgatctctcgccatttaacctccttcttcttcttgcgcccggggtaaacaacaccatctcgtgaaacacttcgtcaacaatattggcgaagcataccgttcgattaagccaatccattatagcgcccgctgcggctaggaacgtgcctcttagtatgagttgagagggccttcctttctcgacttttatgatatggaaatcggtctgtacgttgcaccttaacctagaacataaacaatgcggactattccttcggaaaccgtgaaagacgagtctacaagcccgattcgcacatccgaaggttgtagctccttgattcgaagcttcttcgacgtctcctttgtcataatgttgatggatgatccggaatcgcataggacgtccttgaatttaacaccttgtatagaacaagtcacaaagaatcttcccggactctctatctttcgaagagtattgaaaggtttcaagtggtgtagggcttcctcatacaattccttcatttctcttcttgtttcacaactctcaagaaagaaacggtcaatatggtaaactgaacaaaccttagagaaagggatacctcgaggtagcttggaaacgacttggttaaagtctccaagtcttctcaagcttatcatgcgcggatgccaccagtcttctaggagactgagccggttgtaaacgcttgttcttcccggaggatcttcattcctttcgtcgatctctccttcttcaaggtcgtgaggttatcggtaagttgtaaccacatcgcaaagcacatgagggcttgagtcttcttcttcgctctccatcggttcatgcccttctatgcgtgttgttaggttatcaactttcttgtccaaatcaagaatcctatcaagcgattccacgtttttccttgaggattctatcgtcacttttgtaagtgatgcccggatctttgattgatcatcaacgttcttgacttggttctcctcaacttcaccttgtcttcttatcaggtcctccaaagccacatcttctttcgcatcattatcttctagttgattaatgcgcgtttgaagtctccatatgctctcatcgacgccttccatcctagattggattcttcttaggtcatcttggctaattgaagagaagtctttaccagaacaaggtgaccactcacgtttgtctctcgggtcgagaatggtcttttcggataaggtctcatgaaaccggttttgttggtagcttaggtcatcgaccctcctttgttcctcgtaaaaaggtcctcaagcttacccaaccggctaaccaagttggcatcctcgtccgagaaagcctcaatctttgcatcatagctcttgtccgagtttgatatttgcctcaataatgccctagtgttgatggcgttgtcttgagcgctcttaaggtgcctctcctgctcctcttcgatcctcttgaacctctcttcgttcgccatagcttctttcatgcgcgaaccttcagattttttgaagtttacaaagagggcatcgactttactaaaaagagtaaccttgatatcgtcgatccttgagttgagcgtccttgcatccaaagcttgttgatctacgaattggctcatcaagatctcaagtctctcttcttgagtcttgtacttccaaggcatgtgagaatggtcttgggttggtagcaagggcaaaacgggcggtaggtggtgttgggccgaatagcttctttcggctcctcttggataggaagtccgaaaacgacttggttggcctcttctggttgcatcaaggtccttaccggcttgaataggatccaaacttctcctaggtttagcttcttctatggacatgagttgcccgaagctagggtttgcggatatccccccgctaggtagtcggattgtcatgcaagagtggacatccttgagctcttcgtcttctctttcttcactagagatgttggtgagttcgtcatcttcttctgaaagttcttcgatttggttttcttgactcacaaggtaaccttcttctctttcggtttcggaaccttcttctctagggttgtgttcggccatagagtcttcatcgaaagaggcggtttcttctttttctaaaccctcttcttgatcgactttgtcttgaagagaaactaaaggaatcgaaacccttaaagattttatagggtcgggatttcctttttcggaataggaaactaggtcttttcccttttccactaggaatctgatttcctttttcgtttcctcttcataaagagcttgggccttaggaaacccatcttcttcttggtaagattggttgcttctccaatccaaagactcatttgagttagtgagtttcttctctagctcctcaatcttccaatctagaaggctctcaacggtatcaacggttaaacccacattgaccattctagtgttttggtcttggatatcctcttggtgattaaggagagtgttgttgatctcaacaagcgcctcccccatgttctcgagtcgaatggtgaggttgtcaaacttctctccaaattcggctctcatctccgtcatccttgagttgatcttcctcatgtcttcttgatggtcatcaacgaagtttcggatgagaccaatgattttatcttctagctcggcggcttggtaggactcattggtttggtaagtatagttgttcggatgaacatctacactaatcacctcttgcaagtatccttggtcatagccgaaatcttcatgtcgggcaacttcataaggatgagaagagtgaggtcctcccatgtgttgatctccaggagatgggacgcagtggtggaatgggctaaccgagcggttagcagcagccgattctcaatgaaggcggcagagtgatcattagagtaatgatcggtccgataagctcctccattagacgagcaagactgccaaggctcgccatgcatttgggatgcatcaggcgtgtagcggtcagttgagaaatgtgatccgcggtttgacccatgatttacattcgggtaatagctattggaaaaatttctcgaattcatccttcaagcttcctaaaacaaagaaaaacaaaaacaaaaattaaaagcaaagtgtcctagagttcactctagttctcagacttgtggaaacaacaatcgctccccgacaacggcgccaaaaagcttgatgcgtgttttatttcgcctcaggcttttacctgaaagaccacacgactactgcaagtgcacaatatatcggagtagtattttacgatcgatccacaaggagagaagtagttcagagaaatccttaagaagagagtgaagctaggatcaacataaaagagaggggttgttgtaagctatgagtaaccaaaataaaagacgaataactaaattaaacggtaaactataagagagaagcgttaggtcatcaggggtttctccggatgtcaaggttcaataataaggtatagatctcaatctaggtgataacatggctaggtttgtttacttccaaattcttggagatacgaaactctatcaagaccagctaaacctaacagctagtaggtgaaagcttgctattatcactaatatcttgcgtactcagttgccctatcggctagttggtgctaacatagtttcaaaatacaagatcaaagcattaagttcaaattcgattctagtccataagtccctatcactcggcgggcgtgcaacggttatagttgtttattcagttgagttaggtcaagcattcaaacgagattttgccaaagaatgaaatacctaaggtcaagtactaggtagcgttccggacatacaagcattaagattaaactcaactagaaggaatagtgtaaatggtcaaacaaagccatagaaaccgccaacctagatcttcaatctattggtccccataaattcccctttgaaaccccctctaacccaactagagatctactcgctcatggcaaagaagctaataaaaagttgggttgagtagaccataactaaaagatgaataaaagttaaaagaggtttagagattacttctttgaatgtagaatacaagaggcaaagctccaccttaaagagtcttacacgaaaacgagaaagagaaagagagagatggtgttcttcaagcttcaaaaagtgcggcggcgagtgggcagctctctgcgacggctagggttcgctggtgatgaaggcacacgtagggttaggacttaaaacaagtatttatacttgagggccaagaattagatttaggggtaagaacgtcattccgccgggtaactaagtgatcgggccgagaagtgggcttcagggaaagagcctaatgacggcaacgcatagaggaaaggacttgggcgtgacctaatggtcggtggtgagctactaggagctgcccgggttcaagtctcatcggccggatgtgttttggatttattatttccaaacagcaaattcttgacatgtcttcactcttcgggtcatatcttttgaccggcttcatggcttgcttcgagtcaacttcgacgttaatcttgactcttctagctttccaatgagatcaagatatcttcatgccgatatcgagaagaccttggccggatgctaaacttccaaagcacttgaatgatcgtcttttgatacttttaggttcaaaactcttaaaaccttcttggcacctagaatacgtgtttctcttcttatgctctctaaaacataagaaaataatagctaaaatgggctaaaaagccgtgttatcagtccccaacttcaaacctctccttccgcttatgtcttcttgtttgtttaagggcaagcaaagacaaagtttgggggagttgatatgtctataattttcatgatttagacattcattcttcacctctttgtcattatttcatccacatttcatctcattaggagtcgttttagtgtgttttgcatacttaggacggttttgcattaggattgcatgtgcattgcatatttggttgttttcaggtactttggatgcttttgcagttcaaacaaaggagaaacagagcacaaagtcagaatgcccaatgacgccttcggccaaagtactctatcgaagcctcgaagccctgctagggcaaatcactctatcgcaaccccggagaacctagcagcttagttttactaaatcgtgaagccagaggaatcacccaatcagaaccactcgatcaccactctaccacaaggaggcctatctgctcgttctgcactcaaccaaacaagctgagaattaagaagagaagagaagccgaagcaaccacttgatcaccacctcatgacatccactcgatcgcaggatcgctggaccatttcatctcgtcttcacttcagaccactcaatcacagggaggcccatttcagcgcatcagatgtcaaagacataccagggaatcccatttcagcccatcagatgccaatgagatactcgatcgcaaggtccctatgtgaagactactatctcaaactttccttatttgtttcatttttgcttatataagtagcctctaagggttttccctagggcatcgattaaccatccaacttttatctttcgcaactttcgtagccgtagtatttctcctgcgactttgtattcactttcaagtatttgatattcagttttcgttttaatcctttatcatttctgttatcatgttttcaatcgttgttttgctattgtctttgattatgtctgagtagtgaaccgtatttctgaggatgggatagagttgttgtggtttacttggtcgttttaggtggttgagtttagaatactagaatcacttctagattagttacgcttattgcttgttcctttcagatcaattggaatatgaatctagacattcccgcgctcaaaaggtgttcgatggaatgtcggatctattaattccatatatactcgcctctaccccaaggtattggctgtgtagagagggtattgcctttaacaagttgattcgatattgcctgcttagtttgagatagctaatggtgataaggtcagtgtctacctctgcttgaggattcctgtcacggtagtgaagtaatctgttgcggaacttgttgtctagggatagcttctgtgaagttttgtcaaccgcctgaatagattaaggagaccacactattcgattaccccatccttaggaatcgtttgtccatttaattgcctattatcatttctgctttattactcatctgcctgttattaccatttttgattttagtttcatttcatttctgttattgcatattaggacttttggaatcaaccaactctatgtttggcttgacttagagctttctaatcatatctcatctgtttgcatcacaccagattgaattgacaacctaaaatactacaacgatatgactagtgttttaggaattaattgactaaaatcctactatcagtctgtaatgaggtttagatggtttagttaaacgagcaacattcgagagtacaaggaaagagttcagttggtgtgaattatgtataggagaatttcggtggtatagataatgatgatagagctaatgttggtgctataactctttacgcagatgagccactaggagaacaacttcctgagcctttgaagcctctagaaattgttgctattagagatgtggataatggtgttgatagtaatgtggatgtgagtaaggagaatgatggtattcgtcaatatgttgaggaaccacaaggcagccaacatgctaagtttaaaggtctatgggatgatggtcttgatctagtaataggtcaagaatttgaaaatagagatgatgtgaaatatttagtagagacatgagcaaataacaattgttttggactatctatactcaactcggatacgaagcggtatgtggtaagatgtgctgaagtaaggtgtgaatggtatgtacgatttttgaaggctaaggattcaactcgcttctcggttcgaacatataggaagttgcatacatgagtacggtcgaatactgctacaagcattaaaaggagaggtacaccacgtttagttacaaccgtattgcatgaagattatccaggtcagtacaagaccccaactcctaaaagtctcattagtcttgttcaggaaaaacatggtacaactatgtcatactcgactgttaataggggaaaaaaactagctgttagtgatattcttgccagtccagaggagagtttcaagatggtttattaatatttgtatatgttagagaaggtgaatcctggcacaaaactagtgtggtattagatgaagcaaaaagattcaagtacctgtcactttgggggctgccattgaagggtttaaagtcatgagaaaagtgattattgtggatgcaacatttctaaagactatatataaaggtgtgctcatttttgctatagctcaagacctgaatcatcaccattatcccttagcgtttgctgtagctgatggcgaaaaagatgttacttggaagtggtttttcgaaactctcaaaactgttataccagacagttcggaattggtctttatatcagacagaaaaacaagcctcatcaaggcagtggctgaggtgtacctgagctctcactatggaaattgtgtttattatttgtcacagaatgtgagaacaaaagttacatacaacaaagaagaggttgctaaaaagtttagacaaattgcagccatttgttcagtgtctgagtttgaacatgaatatgcagattttagaagaagaaaccctaaggtagccacatatcttgatgatcacactaatttggaaaatgggcaagatgtctttttcccggagtaaagtacaacgtcgacaccaataatgcggttgagtctatgaatggtgtttttagggatgtgaggaggtatgcgcttttacctatgatagatgcaattattgggaaatttacagaatggagctgcaataataggaatgaatccgtaagtggatcaaatgcatgttctttttgtggagaacaagatacatgagacatgtgaagttgcacaaaaattaacggtgatagagcttaacacctacgagcatcaatataatgtcattggtcgcgatggtaagacctatgtggtggacttgaggaagaaaagtttttattgtcgtcgttttaacttggacaagtatccttgtgtacatgcaatagcggctgtgatgactcaattgaaacaaaaagatagattctcagagataaaaagtttatatgatttggtcacgaaatattactttgttgagatgtgggttatggcatatgttagaaccatttttcctgtgccgcataagtctgggttattccaagtgaaatccaagaattgtttgcatatcatccggttcatgttgttaaaaagggaagagttcaagaaactagacacccatcagttgaagaacgtcgtccaaagaataagcgtgtgaaagacagaaacttggagagctggttttttccaaaccatgaaagtgacagccagggaagtggccaatacacaagcggaaattaatgtactcgtgtttttaagtactttcagattttgtaaaactcgtttaaactttattttctaatggtagaactatgtatggctctgatttcgtgtttttaagtactttcaaattttgtaaaactcggctaaacttaatttttttaatggtagaactatgtatgtctctgaattcgtgttttatgtactctctggttttgtaaaacttgattaaacttactttgtaaaggtacaactatgactaatgtaacaaatctgcttaagttgcaacaaaatttgatgtgatgataataaaggattttaaaattttagttttttggaaggaaatgtgaaattatagtgggaaaagaaacaaaaccgtggggcccgcaaacatttagttatttcccgtatatacgagttgttcagaacaaaatacgtggggcccgtaaacaaatttgcacacagatattcttagtttacaagttgtttctatatatacacagtttgacttttgggttttttgtatttaattagatatacttaaattaaaactaaacaaatttagttataccaaagagtcatgatgtttgatatacattccttatattttcatagaaaaatatgtcggaaaattttaattttgtgtgttttgcaatgttatgatgataataattataaagtcatcttaaaagtataaggtctttcttctataacaagtgaatttggtgaagactaatttttaaagttcgagtaaataatgattttatcaatcagtagttttaataaccaacataagtggtataatttgtataagaaactaaatgaatttcgtatcatttatagatttttgaaacgaaacgacaagaagagaagaagagagaagaagagagaagagtggaattatctgggtaagcatttcgattttctggatatatttttcattcaatttacgtttcacttatagatttctgatattcaattgactatttttgatttcggacatttaagattcatatcgtacaacctggtttatttattgattattgtagaatttctaaatccaaaactcagggaaatatgagccacctctcaggagcttcgaactcgtgtggaacctccattgtccgaccaagaccaaaggttcctggaattccaaagcattgttggtgtggcgattaaatcgttgagaaaatttcatgatcaaatctaaattcgtactgttgttattaccggtgtatctttactgcagaaagaaaggtaatatcttattttgatgctttgtaaacaattttgatgggtgaaactttaacaatttatacatagatatatcatttatacatagatcgtttagcatagatatacctaatttatacatagatatatcgtttaacctctaaagtatctaagttatattcggacatagatatacttagtttatacatagatatacattttagtttaacaatttttacaatttcaaaaatgtagcttatgaacgacaatcatgtgtttaagtgggtagatgaggcttttactcattagattggacagttggaatttcaactcggtgttcttgaagaagaagttagagtgatgaagatggaaaggaaccaagagaggatggaaagcggtccgatggaaaagaacaaaaagagaaggacattaaaatggtaatcgtttttagttgtggtagtttaatcaccatggcaattttagaatgttgtgtttgtcgtagaaaaaacctaagtgttgtaatgtttaattatgaagaataagtgttgaatttgatatgatgaatggatatgaatctaattacgaagactaagtgttgtgtagtagaaaaaacctatttatttgggttcatattctttttttaacaattacgaagacatataattgtacctagtgttacaaaacataagaaaatataccaaaataaaacaataaacatgcaatagttataccaaactttcaaaagcataagtagatatacaaaaaaaaaccaataaacatgttcaacagttgtaccaagttttgaaaagcataaggagaaatacaaaaaaaaaacaattaccaagttccaacaattgtaccaagttttcaacaaccaacatagttatacctaaaaaaaccaacaattaaaagtgcttaaacattcttcttcgtctttgtcctcgcatttctcgtctgtataggactctgatacaccggcttcacattcgtcctcgactttgccaccttctttaccaccttctttaccacctttgggctttttaacgtcccttccatcatcatgtgactttcctcacatcttacttggctcagcagccttacctccatccatctcatcatcttgaggcacctctttgtctttctccatctccatattaccaccgcacacctcaatctcactttcagccacctctttgcccttctccatctccttattaccactgcacaccccaatctcacttccagccacctctttgtccttctccatctccctattatcaccatccacatcattcttattttcatccacctcttaattcatctccatctccttgttaccatcaaatacatcactgtcatcttgagccacctctttgtctatctcagtctctttttctccaacctctctctccttatcaccaccatttgcatcaatcccttcatctagctcgttttctctaacatcactctcctttgaaccataagcaccatatgttccagtgcttgattggattgatttgattgccgcttccatcagtttgagttttttttatcttactcttcatacttcttactgaaatctttcatcctcttattcatggacttaaatccattctccatcaaattcttcaatccgtatacaacctcagtcaaaccatcatcacttggactagtcggagatgcagcagcctttcccttgcctttttttcccactgcggattatcttggagctcttaccacagtagacagagctttattagccacaaatgtatggtgtgctacatcttcattgaacaacagttcaaaacatatagccttctgctcttcaacaagacgtttcttccagccatcagctattacatcatcaacatcattcactccacactccacatccataattctttccaaacgtagtttctcatcaggagttggagtcaagatactctaaatgtcttaagcatgataaaaaaatccaattaatagaacatccatgatacatgttagataactcataaacatgttatcactaaccttagttttaccgagtttgtcatacacatctggcattggaaaccctttcatagtgcttgatttaaacttcattttacaaatccggggacactgagatctgcacattcaatatcttcgcataaatttttcctgagaactggaatcgacttactacaaaacaaacaaaatacaaattattcaaaactaagttgtataattgctaataaaaacaaagttgtacacaatttaactttcttaaaacaattaagagatgaataatgaaatgacatacctccaaaggcataacaaaactaggaaacaccttttgtggaccaactactccattgcattggtccatcaaatagaaaatgtttttcacattttcatcaaatgcatatctcccccacgaaaatattttgcacaactctagatcagccacaaccctaaggaaaaacttctccacacttggtgcattttctcctgtcttaccctttccaatgattacactacataagaagtagagcacagctactcttagacgagcctcagaaggttttttcatagacattaacttttcctccacatctggatattgaattgttgctctgggtccaaaactcttgccgacaaaagtggtactgcccaagctgttgaagggtttggtataactatgacagtataatcctgacatgagtgcaaattcttcgagagaataccggatcggaacgccattaacaataaacggtacttcccttttcttctctaaacatgatgtacgaagaaataacagccacatacccatcacaccttatgatttgggtccttatgcatgtggaagaagtgtttgaactgtgggtgatccaaaaatcacttcaactcagagtctttaagatgactctccaataatcttattgccttatgaagataacactttgctgtaatcttgaatggctttgtatactcacttggaccaaagtacattttaagaggttgaagagctttggtttcctcatcagaatcttgcaatcaacatagatataccttagaaagcaacatagataagttagaaatcaaaatagatatacctagtttatacatagatatacattttagttttaaaattttttaagttagattcaaacataaatatacctagtttaaaaaaaaaaaatatttttagtttcatattgatatatccctatttttactgattttatctataatttaggtttaggattttgagtgtttatgttatttctcgagtctttttagtgtgttttcaggtattctatgcagtgggacaacaatggagatgatgagacattttggagcaaaagctaaggaaaaggaagctaaggacgatctcggattccagattcagagagagtgtcgatcgacacaatcctggtgtcgatcgacacccatttcggcccagcaaagtcaatgacgctttcaaatttatagaagtggaaatttgccccagaagacttccctatttccattattagtccatggacgttttataggtcttatgtatagttttagaggtcaccttacaactccttctgggtgtctactagtgtcctaggcaccttaatagcttattcaaacaaaagaaatgaattgataaaggaagatgattctcctgcgtaggagagcccatgcctaccattggattcagtttagacctaagttccttttatcaagttctttgcaatcccttttttcagagacataagctattcatccattgttttcaaagattcattcagttttcaatacagtgaagagatattttcttactctcatcttatttgctgtgtttatgctttctaactctattatgttgtttgtttcattcaatatgtcagagtagtttgcttgttagaaatagggtatctcattagggtttcatatggtttagtatatcgccccctttgctagaatatctgtagagtaattaatgctagatctagagtaattaactagattttgaatccaaacaatagataccataggtatctatagttggatctattatttgatgagcctggtttataggtgtgtaataagaatcggcttatctactaggagaacaattgaactcgtttagaatgcatgtttaggttaaaaatctctcttattctccggttattcttagctataggcatagggagtttcgcagaacacagccggttatttaataattagagtttgagtttaagaatggttcgataacaacctagctttcattaggtttagtaaccaataattcctgagaataccatgttcctagctctttatttcatcgtttacaaccaatcaatcttctatttttttacttggtttacttttattttcttataatctcttctagattagtctcgacattcaactcattgtttgaacaaaagaattttgtgaaaatcgatccttaaatactgcaattgatctcttatttgagagagtagttcttaggataatttgaaccttatcaaatttggcgcctttgccaaagttcttgggaatcaccattgagtttagtttagagatttcgtctagtttttacttttattttgttacttacgcgttttttgtttttgtttatgttttgtgtttcaggtgtatgcctaggcaaacaaggagcacacaacagaaagagccaatcaacttgtctgttttggacttgggaaaacttgaacgtaccaaccgaaaaactcagagattagcaatggatgacagagtcatcagagctgatgcagaaggagttttgggagatgaggatgggcaagcctacaatgaggctggtcagagattggatgatcatggactcctcttacctgaggacgccaatgaagatcaggcacgcctcaatgcgcaattagctgccagagacacaatagggctcggtgtcgatcgacaccttcgggagcagaatgcagacacgattggtgtcgagcgacacaacagaggtgtagatcggcaccaaccccagaatcttgcagctattcctccagctgcagaactacgtcgtactcttaggaatttaacaggcctgacctgttctatgctaatcgatcttcgatcgtacccccacccttccaaagaaacgattatgagctaaagcctggctactttgctttagttggccagcatcctttccatggcttatcttatgagcagccaatggaccatatcgagcgttttgaggacctcgttctgagcatcaaagctaatggagtctcacaggactacctactgtgcaagctcttcccttattcacttgttggggaagccgcttctttgctgaaacaactaaaggcaggttccctcaagacttggagaagcatcaagatagcatttttgaacaatttgtacgatgatgttaagtctgaggagctaagaaacaagctgtctaccttcacccaaggtccagctgaggctttaaaagccgcttgggttcgtttcaaggagtatcaacaggtctgcccgcatcatggcttcagtgaggtataacttcttggtacctttttcagtggagttgattggaggtgccagatggctctagatgcggcgagcaatggtaactttaacacgagatatccggctgatgctaccgctctgatagagaatctcgtttgtagtaacagcaccaagaatgctgactttgagaggaagaagattgttggagctgtttcaggcaatcagatggcagaggtacatgccaagttgtaatcagttcacaacttgcttacaaggaagaagcatgtccactttgcagttgaggatgagtctattgagcctgagactgagtcagaagagggattcttctacatagatggtcaggactacaagaagtttgggcagccacagggtaacttcagtggcaatcggtttacagggaaccagagctacactccaaagcctgcctttcaaaagtcatttcctcatagcaacttcgagaggacatatggtaattcagcttaccaagccccccttccaccctcatcagagagcataatgcaatctatgcttgagaagattcttgagagccaaacaaagctcgttgtcgagtttaatggcaagtttgatgctgtctacacagatcttaatgggaagatcgacaatctgagctctcacttgaagaagctggatgtacaggtagctcaaactacacaatccattaagagacaagagggttttcttcctgttaatcctgatgctaacccaacgaagagctgtaatgccatcttgatcagagaaggagatgatgtgtggaaagaattagacattggagacgagttggagctcgctactgcagagttggtattgaccgaaacctacaagtgttgatcgacaccctatagaacactcttctatgagacgattccatacgaaggtgtcgatcgacacacctctagtgttgatcaacactgggtccggactgcaccatatgaggtgcgaatcccgatgaagcccgagactgcttacactcctcctgtcccttatccgaaaaagcgtcgttctaagcaggagattcatgcggctaagtgcacaaccatcatggagaagatcctcatttctcttcctaaggatgcttctaaaacatcttctactccactcaacaggtatgtcaagcgacttgttgacaatgagattagctctgctgaagctaaactgctgacaagagacattagtgcaattctgttgcctaaggtcaagaaagagaaggcacagagagtggacattgctgagtacattcgctctatcactcctgattagaccactgagaagctcccggatccaggcagctttattcttgattgctctatctcctcaagcaggttcagccgctctttgtgtgatctgggatcaagtatcaacctcatgcctaagtttgtttctgagagactaggcatgactaactacaggccgactcgaatcactctcctcttcgtggatcgttccaaatgaatccttgaaggaattcttgaagatgttcctgttaaggttggtaactccctaatccctgctaattttgtggtcctggactacgagaaggaacccaaggatcctcttatccttggaagagcattcctagctacaggtggtgctaggattgatgtgaagagaggtaggatctctctcaaagtttgggatttggagatggagtttagcatggattgttcagcgctcactaagcctatcagtagtattgcctctagcacagatacacctcctctgactgctcaaaatcccaaaacatagccacacacatcgctcccatccgctcagctcgcccatgagagttgcagagaattggtgtcgatcgagaccatccctccggtcgatcgacaccctcggaatccacagacagaggattatgcacattctcttcagcccacacctctcgaagccctctgtgataagttctcctctatctcttctcctgctttaccttcgattaattccccaatgattcaaagcctagagttgttgtccttctgtctaaagaattaatcgagagtaaagcaagagaagagaacttatcacataggtcctcaagtggtgtgggctgaagagattgtgcagaaccctctgtctgtgaatcccgagggtgtcgatcgacaagagtagtcgtgtcgatcaacactgttgctctacaactctcattggcgagctgagctgatgggagcgttgtgtgtggctctgtggtgggattctgagcagtctgaggaggtgtgtttgtgctagaggcaatactactgataggtttagtaagctctgaaccatccattccaaactccatctccaagtcacaaatctttagagagaatctatctctcttcacatcaaacctagcaccagctgtagctaggaacgctcttccaaggataagaggatccttgggtttcttctcataatccaggaccatgaaatcagcagggataagagagttaccaaccttaacaggaacatcttcaaggattccttcagggattcgtttggaacgatccgcgaagaggagagtgatgcgagtcggcctgtagttagtcatgcctagtctctctacaacagacttaggcatgacgttgatgcttgatcccagatgacacaaagagcggctgaacctgcttgtggaggtagaacaatcaagaacaaagctacctggatctggaagcttctcagtagtctgatcaggggcgatagtgcggatgtactcagcaatgtccactctatgtgccttctctttcttgaccttaggcagaatgatggcattgatgtcccgtgtcagcaacttagcttcatctcagctaataccattgtcacaagtcgcttgacatacctgttgagtggagtagaagatgtctcagaagcatccttaggaagagaagtgaggatcttctccatgatggctatgcacttagcagcatgaatctcctgcttagaacgacgtttccgcgtataagggacatgaggagtgtaaacaaactcaggctgcattgggatttgcacctcacaaggtgcagtccggatccaatgtcgatcgacacttgaggggtatcgatcaacaccttcgtattgagttatctcagagaagagtgtcccatagggtgtcgatcgacactggaaggtgtcggtcgacaccatctctgcaatagcgagctccaactcgtcttcagtgtctaattcttcctacacatcatctccttctctgatcaagatggcattacagctcttctttgggttagcatcaagattacctgtacatccagcttcttcaagtgagagctcagattgtcgatcttccctttaagatctgtgtagacagcatcaaacttgccattaaactccacaacaagctttgtttggctctctagaatctgctcaagcataaatttcattcttgtctctaatgaaggtggagggggggcttggtaagctgaattaccataggtcttctagaagttgctctaaggaaaggtcttctggaaagcaggctttggagtgtagttggaggaactctggttccctgtaaacttggtgccacttaagttgccttgtggctgcccaaacttcctgtagccctgaccatcgatgtagaagactccctcttcagactcagtctcagactcaatagactcatcctcagctgcaaagtggacatgcttcttccttgtaagcaagttgtgaaccaaatccaacttagcaatcacctctaccatttgattgcctgaaatagctcatgcaatcttattacaagcgaggttctctatcagagcagtagcatcagctgggtaacgtgtgttgaagttaccattgctcgttgcatctagagccatctggtatctccaatcaactcctttgaaaaaggtacctagaagttgtacctcactgaaaccatgatgtgggcagtctcgttggtactcctcgaaacgaatccaagcagcattgaaagcttcagctggtccttgggtgaagatagacagcttgtttctcaactcatcagacttaacatcatcgtagaaattattcaagaaggctatcttgatgcttctccaagtcttgagggaacctgctttaagttgtttcagccaagaagcggcttctccatcaagtgaataagggaagagcttgcacagtaggtagtcctttgagactccattagctttgatgctcagaacaaggacctcaaagcgctcgatatggtccattgactcctcatgagataagccatggaaaggatgttggtcaactaaagcaaagtagccaggtttcacctcataatcgttgatcgattagcatagaacaggtcaggcctgttgaaatccccaagagtacgacgtggttccgcagctagaggaatagctgcatgaatctagtgtttgtgtcgatcgacacatgtgttgtgtcgttcgataccaatcgcgtcttcattctgctcccatgggtgtcgatcgacatctttgttgtgtcgatcgacagcgagccctcctgcatctcaggcagctaattgcgcattgaggcgcgcctgatttcattgacgtcctcaggtaggacgagtccataatcatccaatctctgaccagcctcattgtaggcttgcccatcctcatctcttaaaactccttctgcatcagctcggatgactctgtcagccattgctaatctctgagtttttcggttggtgcatttaagttttctcaagtctaagacagacaagttgataagctacttttgttgtgtgctccttgtttgcctaggcatacacctgaaacacagaaaagaagaaaacaagaaacgcatgagtaacaaagtaaaagtaaaaaatagacgaaatctctaaactaaactcaatgatgattctcaagaactttggcaacggcgccaaattaaatacggttcaaattaccctaagaactactctctcaaataagagatcaattgtagtatttaaggatcaaattcacaacgttcttttgttcaaacaatgagttcaatgtcaagattaagctagaaggtgatgattgaaataaaatgaaaataaagtaaaaagatagcaggttgattgtgttgtaaatgattaagaaaagagttaggaacagggtattctcaggaaactattggttagtagatctaatgaaagctaggttattatcgaaccattcttaaactcaaactctaattatggaataatcggtggtgttccgcgaaactccctatatctatagctaagaataaccagagaagccgagagattattaacctaaatatgcattcttaacgagttcgattgttcactagtagataggccgattcttattacacacctataaaccaggctcatcgaataatagatccaactacagatacctatggtgggcatatctattgtctggattcaagatctagttaattactctagatctagcattaagcataatcaaagatgaagaaatctatagataaccaagcagagggggcaatctactaaaccatatgaatccctaatgagaaaccctattcctaacaagcagattactcagacatattgattgaagcaaacaccataattgagtatgaaagcataaacacagcaaatagaaaaagagaaagaagggatctcttcactgtattaagaactggaatgaatctctcaagaacaatggatgaatagcttatgtctctcacaatagggttttgcaaaaagcttgataagagaaaactagggtctagaacaatgtatataaaccctataaaacgtctagggagtaataatgcaaatagggaattcttttggggcaaatttcctcttctgtaaacttgaaaacgtcatggactttgctgggccgaaactggtgtcgatcgacaccaggagtgtgtcgatcgacactcctcttgattcttgagtccaaaatcgtccttagctttcttttccttagcttttgctccaaaatgtctcctcatctccattattgtcccactgtatagaatacctgaaaagacactaaaaagactcgagaaacaacataaagactcaaaatcctatacctaaaacttagataaattcagtgaaaatagagttatatcaatagatatacctttagtttagaaaattttaaagtttgattccaaaatagatatacctagtttatacatagatataccgtttagtctctaaaatatctaagttatattggaacatagatatacctagtttatacatagatatacattttagtttcgaatatttataagttagattcaaaatagataaacgaatttatacatagatatactttttaaattttctaagttacaatattaacaaagatatatctaattcatacatagttatacttttttagtttcagaattttgtaagttacaaaatggataaagttctatcataatctgctagttgtataaagtttaaagttcataccgctctatcatcgttagagattgaatttgttgcttcagaatccacttctgcagccgatgctactactacttcgtcattgattgtctgtgaaaccacctccgccggtgttggcacacatgtgttctttgttcgagccatttctccaaacctacaaacaaaattatttggattagcacttcgtgttactctttaatcaatttcaatcacaaagcccaaaataaaataactagaatccgattttaatgtaaccaatttcttagttttctacagatataccaagatcgacgaatacagatttgtcgttgtcaaatggcgttgacgagaattgacgatatattttactggatttagattttcaataaagaaagaaggaagaaacagaaagacagagtcgtggatcgattttaccgcagagacaaataaacttagtgttttactagggttttgttcggttttattgtatatgaccgaataaaatgggcttgggtaattttatgatccatttaggttggttgggtcgtaaatagtcgatatgtttaaggttttctgggtcatttacttcttttacggataaaagaaaatcaaaaagaaaattctttttaaaacataagtatctgagattactctcgactcaagaggagcccaagagaatttctttcgtgtgtgtgtttatactcttctttttcaatttgttatgattttgatattttttgcacaattaatatgatgtgttacaaacaaataataattgtaaatacacgaaattttatttttttgtatacttagaatagtatattccttttttcacttgagaacaaaatatttttgtaatgtgttaaatttgtcacgagtttcttcctttacttttgtcaaaggtaaatatttacatttacttttaattaataattctttgaattttgagtttgaagaagtatatgcaattgttttagatacctctactttgatcgcgttattcttttctgcaattttttcacgttacgtgtttacaatatttaaacatatagaaaagtgacggacaacaatcttcgagtaacaaatatgtgaaacacaaatatttgttaatatcctaaaatttcacaatacatattacaaaaaatatagaatttaaatactcgcacattaaaaatagtaaaaatagagtactcgatcattcaaaaatcattcaccttgatgataaattcattttatggatctaaactgctattatttttttgttttgtatttacattcaagtcattataattatattgatgtatattgacatcatcactgatatattaaaaaaatattcagaattatagatcacatattatataaatataaatcgtactttttaacaacaatatttagaaaaaaaccacgcgtagcgtgggtcaaaacctagtaatggataatagataaaatgttaaagcaaatttcaccttaataaattttaatatttcattacaaataaattatctttgtgataactattaagttatcaacttatttctttcgaaattaaattacatgttccagaaaactaaataaaggaaataaattttgcgaccaaaaagaaaataaaagttagaagcaaaaccaaaacgaaattaattaatatcaactttctttcagtgtgatgattgttgtaacaactctttaatgtgcaccggatatttagtttgggacttagatatttaattaagttgttacctaattaaaagagtcaaagattcagttctaaattaagttgttaccttttacttgtaatttgaaatatctttgacttgtaattggaaaatctaatatataaacttcttgggtgaagtagttttgaaacttaaacaaaaacctaaaataaattatactctttgaaattataatttctactctttgaaattatgaataatctttttgttttgctcattattattgctttgagtgtgggatcgaacaatggtagcaagctctggccaaaaaaccaattacactttagaaactcttttagcaggaattatgatgttcttacggttcattgcaaatctaaagatgatgatctcggtattcacacagtggctcgttcatacgaatataattttaagtttgaggatagcgttttcggtaggactgagtttttctgtacactaatgcatggggttggttctaaatattctgtaacatttactgcatataaagcgaaacctgcttttgttgcaagtaccggtgtcataaaaatttgggatgctttagatgatggaatctacctcacagatgaagatcacgatttcgtgaaaatatatggttggtaaaatcttacttttcaagctatactcttgatgtccataaatttcaagatataaattataagaaattaatacttaatatattggatttcttttgaaattgtatgcaaaagcctaaataatatttgctggtaatctatgtgatttgacaaatctctattttttaatgttttgaaactaatattaaattatattgaaagaaaaaataaacgtgtattcaaataaatgcaaactttttaaaaaagaatgaacaaaggaaattatccttacttttttgcctttgatgcaaaccaatctcgtaagccgccctcataattcagtcaacctcacttcgtattgtacttaatctatttcaaatatccttatcagtctcttgcttggtgatggcttgtctccatgccttctattgttgctcttttttttgatagagtaaatcgcattctgaaacacataccttagaatgaaaatttttgttgtgtcaaggttgtttccatttagtagctgaaacatttccctccaatctgtaaagaaccttgcgagaagaaagcctttcatgagtcctttccatattgttagtgtaaatgagcaactaaagaacagattttcccttgtttccataggaatttgacagaaaacataacttgtacttgcttgtacattctactatgtcattctttcacatgttgttactctattttttatgaccaaccatgttaaaaaagagtatttcggggttgcatacgtaaagcatatccctttgtgacccgcatcacaggttttgtagttcgtaagtgtgaccatgtctcttttgacttgaaaacttttctataacagtccttcttcccttttcagagagcaacatcagccaaggttttttcccaagtcagtttctaatttcttatctcctcttcgactaggtttaaaaacacttgcatgtgcgatatgctctaattcatacccattactgcatccactgtttttgttcttcggattcctaggttaacctagcttcttatataaacaacctacgtaattagctccatctttcaaaaaaaaaaaaaaaggtagtatcaccatttctgatattgactatgtgaaactgctttactctttctcggtatttcaatatcttcttccacatccataaaccacacattgtggtttctttcatgtcccaagaagaactgttttttatcaagtattttttgactcatttcacccataaagaacccttggctgatagcaaatgccaaattaactttaaaacactcactttgttagcttctcaattgaacgcaaacctagtcatcctcactttttggtgcacagacttcagaccatgcaacctttgatttcctagggttcataaatggtcccgaccaaaggaaagcagagcatatttttttatctatcgcccagaagccgcattccaaaaaatggtgaggctataagtcaataactcactaagcttactagtttgagtcgtccagcaaaagagagtgctcgaacaatccacaaactgatctgagatcttactttttccaacaggggttggtagtctaatgttgtcatccttcttgttaaaagtggaagacctaaatatatgacctgtagtgtcccatattcaaaaggaaactgttggagaattgcattcttttgaacatcgaggaccctagccatgtatatagtaaacttttcaagactgattcttagacccgtatgtgtagcaaagtcgtcaaaaaccttgagggcgccatggatagattttctattcccttgaacaaagaaaatcaaatcagcggcgattcgtaactaagtcaacttcaggagcttacattttggatggtacccaatttgtttattctttgcggccttgtctagctaacttgcaagacaaaatatttactcatataacaaacaaatatggactaagagaacagccttgtattagccctcgttcaccgccaaagtatccagctagttctccatgttataagaaacagagtattgaaagatagataaaggtccgaataattctcttgttaagactgaaacaaatttggtctttatatagaccttacaacaaaatgaccgaagcaaactcaactcaactaagtccaaaaacagactctaaatttaatcgtgttttaactcctacaaaacaagaggacttattcaacttagaaacagtcaaacttaagtgaataaaactaaagcaatgtttcttctttcaattcctcccttaaactggaacagctccttcttgtttactccttcttgctgcacactcccattctttgtctaagcttctcaaatacttcaagtttgacagctttagtcatgatgttagacaattgttcttgagtagtacagtaatccagcaatatgactccatctttcaccaactcccgcaagaagtgatacgttacatgaatgtgcttgctttttccgtgtaacacaggattctttgacaatttgatggtagaactgttatcatagaacaagactgtaccttctccttgaactgacccaattttttccagtatattccttaaccacactacttgacatgtcccatacactgtcgacacgaactcagcttccattgtggatagattcattatgggctgcttctttgacgtccatgaaactgctcctccaccaagcataaatatatacctgaagtgcttccgcgatcatcaatatcttctacataatcgctgtccacaaatccaacaagtttatgctctcctcctagcttatattatataccatatgcagaagttccttgcacatatctcaaaattctctttgctgctagcatatgttgctcacttggtttctccttgtacctactaaccaagtttatagagtaaaccaagtctggtctcgtaggagtaaggtaccttaaactcccaacaagttgtttgaacgttgtggaatcgactacatctccacctccctcctttgacagcttgtaacccggcacaataggatttttttgctgaattacaactctccatcccatacttcttcaataactcttcagcatacttttgttgatttataaatatcccctgctcatcttgaataattgcccctcccaagaagtatttcatttttgcgagctcagtcatcgagaattccttcatcattgaattcttgaactcttcaagcatcaaaaatgaattattggtatagatcaaatcatcaacatacaaacttacaataaagatgttctcattttctcttttcacaaacagtgtatgctcaatagcacttttcgaacccttccttcacaaagtatccttcgattcgacgaacgaagttctaggagcttgtttcaacccatatagtgtgttgttcagcttgtataacttgttcagttcattgcttacttcgaagtcattaggttgctcaacggagacgtcttcgttcaattctccatgcaggaaagcacttttcactttaagatggaacacgttccaccccttttcttcggccaatgcgagaatcgatctgattgtatcccatctcgccgccagagcaaatacttcataacaatcaaccccgtacttctgatgatagcctttcgcaaccaatcttgccttgaatttatcaacttccgctttctcgttaaactttgtttggaaaacccattttacgccaataatgtttgctccggctagtagatccatcagctaccatgtattgttctcttcaatagaagtgaattctgcatcttcaaaacactcgggatcctcggcaacaacaaacattgcaatgatctcttatccatcttctgtaactaagaaacctgcatttccaagaacgtaatccttcactcagactagcgcttgtctctgtctaattgttccttctcgcacaggagtttggttgtgactgatttattgggttacctcttattccactctttcctattcaccattatcatgctcttcaactgtgacatcttcttgtggttccataggtaatgtatcaaaactctcttctcgttcggattctgtcacaatcagctcctcactctgcatatttccttcccattcccatcctttgctctcatcaaaatgaacatctttgctcactatgatcttctttgtttaggattgtaaaggtgttatgccttagactccttttttaacccgagcataacgcatttgacgctcttctcattaagcttaattcttctttcatatggtactaaagcaaaggcaacacaaccaaatattctgagatgctccaccgatagcttatgttggctccacttttcttttggtgtgacatcacctaaagctgttgatggactttgattcaatatatgaacagcatactgaacagcttatggccaaaaactccttcgcattgacatttccatcaacatacaccttgtcatgttcatgacacttatattcttcctttcgtctatgccatttgatgggtgtgtaagctgtagtgagttgtctcttaattccattctccctacaattatcttcaaattccttagaattgtattctcaggaaatacgtccaatatttttcatcaatgaagttaattttatacctcttcccaccctctaaaataggagaaatagacccacaaatgtcgctatgaacaagctggagccctcaagttgatttccattcactatttgtcggaatgttttcacgaatctgtttccctttcatgcatatttcacaaacaatttcagcttcatctgagttgatcttcctccatgagctttccattgtccttctaccttcaaggctcgttcttctcccacgtgcctgcttaggttctgctcatgaaccatcaaggagctttgcaattaatccactgtgagctctttgatatcatttgattcttcaatagcacatacaacatatgtgattttttcaaccaaagttcttaagatcttctcaactacctttaagtctagtatgtcttctcctaggttgcgcatatcgttgacaacctccattacccttgagaaataaccaatgatcactttccctatcttcatttcaagcacttcgaaacttctactcaacatttataactgtgcgctttgcactctactgttccttgatactttctcttcattcgtcgatgtatctttcttcaaaattgttttgaaaatggtcttgtctatgaaggcaaacatatagttcttcaccttgcgatccttgacagtctgctccgccaactttgtacagtgcgttccggttaagatcacgtttctctctggtcgtgtgattcctgtttcaatgagatgccaccactcctttgatctgagcaaattttccatgagcattgccaaatactcgtaatccccatcgaactttggatcaaccagtgtatctctctcactcatttttttctctcttgtaacaggctcgtgacaggctctgctaccactttctccatcgtgtcacccatctacgggaagaaatcctatagctggggaattctgaatgtggctttcggcactgtcatctttttctccttgctcctctacattattaggaaggtattcgaggaactaatctctttctgcaacacatctacaaccagaaaacaacccagtttcgttgtcgttctcgagatgatcatcttcttgtctctcgtcgtcaccatcatcttagtccattcacttgcactgaaaatgaggatgtagtaatccatgtctaaatccactgtatatatttctctcagaattcaagagctctgatcttaacgtgtttagtaggaactccactgaaccgagtcaaaagctttcaaaatatctattttcatcacgcatcgaggagaaatagtgtctttgtggtagtcattgatgatctatgtggtgaggaggtggttttccatcatcaacatatcctttatagatgcttattgatttggagaaatgaatcgtggtagaatagtcttgattcggtttgccagaagcttcgatatgactttgttaagaacgttgcagcatgatatttgtgcatagtccttcattacaatagcttcttttttctttggaatcaaagctaagatggttgagttggcccctttaggcaaaaaaaacagtcttagaaaagaattgaaatgccaccacaaagtcttttcccactactgacctatttggactcggagatttgttgcttggcattgagaacaatactttcttcacttttccctccgagacttttttgtgtgagcattgccttatcattttcttcacatttaaactccattagatgtcccaacttctcacttgaccattcttcgtagccttgtggcttctcggttaaaaaactctttaaatatcttttaggttcagccttattctctctttgagtgactgctatttggccatcttcttagttttgctgcgttgtagaaacttttctaatttttatcctctattttaatacagtcgagtttcgccttttgtcaaaaatatcctgcttcaatgtctgataatctcctccatttattgtaagttgctgcctccaagtccactgattatatggtttttaaatctcaaagctttttatatgcctcctttgttcgaattgatatatctctctacaaccatttccccatcctgcggagttgtggtttcagtgcctatagctttttttgataacatgtgaatcgctgaagtggaatgataaagtggtgtggactaagcccaagttgcttctaattcttcttagtagcccgatagtgtagctaggtggtcattcatatcgttataactcttctctcctcctctttaatataaaatctacatcttaaatgatctgaatgacctcttgtctcaaacatagagtacgattaagcatatagctgtaatcagttaattcacattgttggactaaattctgaaaatctctcattcctcgtgatatcaatggtaaatgttcatacattgaatgatcctctccttccaacacctcactgaaatctgcacatatcaaccaagttttaccatgaaatagagcaaaactatgatagtgtcgaagatcggcctatagtgttttgcgttccatcacaaaattggatgcataaacaaatattgcaaaacattcttccttttctccttcaatcaagatcgaacatgtaatcaattgtgatgtcttgtagataggcgtgacttgcacgttatttctccaaagcaaccaaattcttcctagtctatattcttcataattgcatataaaagaccattctctaaaaactgactttgtaatcttgtatacctttctttcttttacttttgtttctattaaaaaatcaaaatcaaacttccccctattcatccaatcccttacaacatcatgcttacctcttttattaaaatatctaatgttccagaagaaaccagacattaagaatgttgtggaggtttacttgtcttcaagtagttaggatttattatcctagaattgtgcatgtttttgttgacaaaaattcgtgaccatcctttgaatacatgttcgattgattacatcctcagcgtgacaaatccaaattcacaataaatcatataagcaatacagcttttcgattacatcttaaaccaccttagtgaggttctataactaaaatggttgaattatattaaactaaacaaacaatgttttctaaaaatggtatgcccaaaaatggtttacgaaaaatagactcaaaaatacaaatgtcattggcgaaaaataaatgacaattaatgaatatacaaataatagataaaaagcaaaatgaaataaattttcaatgtttcatttagttaaagatagtgtatcttgaagatcataacgtattttagattatgtacctgatttataagtggcttataaatcacctaccattttaccagtaaccgatctaatctacacacaaatatcatcttttactcttataagattttaaccatatttttagatctcataagaatcaatgcaatttcatataaaacatcaaaataattctataaattaaaattttctcaagataatatttaattttatttataaatctcttaattagccatctttctacatttatcaaaagatattagctatctgttctcataggcaatatgataaaaaaaaaaactttttccaagttaggggcacaaaaagagtttccctgggacttgggctgagaataatgaagtggctgggaaatgattagttaaggatggcttgatgaattctcaatattctgttgagggaacaaaatatactaggaaggatgcaagtccagtttggtctaaaccattgtacgaaccaaaaacaatcaataaagtaactcagggctcacaaatggtcgataatatttctaaagtttcagttctagaggatgagcaaaaggatttgatgatgggagatgtactagaggtacaagacaagagtctcactgaagggttgaatttcagatattttaaatcacgtttggagtaacaaaaaacaaatgtgagaaggagctcaattagctccaactgaatctagtgttattagggatactttggaaactccaattcaatctttaagatgtaggattgatgaattcatggaaatcggcagatccatctatgaatttagtatggtggtgtttcctaggaattgacaatacaattttacttggtgcaaagtgtcttcggaggtgtccctttctttttcactcggaattggaagttttaatattggcaataaaaaatatcctttcaagaaggataaagtgtcaggcatttgaaacagataattattcagagtaagttttgatggtacagtcccctgaagaatgactcgctttctctaattttttagaagatcttgaattgctatgtgtctccttttcttgctttcttctatttcatgtttatgtaatactaaggcaaactatttagcacaatattctaaacttttattttctgaagttattttttaaaccctttccctcctaattggacaaccaatcatggaattagtttttacgtaatgttttaaactcactatttcacctttattctgacctgttaatggaagacaactatgactttatacattgaaatgttgtcaacctgttatatattaatgttaacatagctaatgacctatcaatgtacgtaaagcgaatgtcaatcatattcgtatccgttaatttcatttaggaaatcaggctcattgccaatccactaagaaacatctctgatagatccaaataataaaaataatataatatgaagcaaaatagaacgaaatatctcacgcggaccaaactttgaactttattataaaacaaatcagcacgtgaaagtaatggtcggttcggtccaagatgccaagaactcctccggtccatccatcaacctaaccttttttggatataaaatttagcaaattccatttccacgaccacacaacaacaacacatccactcgaattttctatttccgaataacaaaaccggtaaactcatcacaaacttaagttactttgtagtttgtgttttgtccttttatgtaatgaagaagatccaactaactactactcaatatttttgtattgaccgttgatttctcagatctgacttttacttctccttcttccagatcggcggagacatgacggcggcacaagggaactctaacgagactctgttttcttcttacaagatgggaagattcgatctctctcatcggtgagtttcagctagattaatgatcttgagtggtttttgtatgacgtgtagtctcatatcgcgtttgcgttttcagagtggttctggcgccgatgacgcggtgcagggcgttgaacggagtaccaaacgcggcgttggcagagtattatgctcaacggaccactcccggcggttttctcatctccgaaggcaccatggtctctcccggatccgcagggtattctcgtcattttacttacttctttctttcttttttaagaccaaaagtaaaaactacgatgagatgacgtcaactaactgtactgtttaataaacggcttttgtcgttaggaaaacaatctgattttcattaaaatatcaaatcaactcatattagtactattatttatacataattttggttttatcaaattagtattattgcggcttagatgttctgtccaagggtccaattttttttattattttttttcatacaaaaaaaataaaatagccactaatttaaaatatatatcttaaaaactccactttagttataaaaaactatgtgaaagatctaagtttttttaaataacatttctataactaaaaaccacaaattttgaaaacaaattaacaatatttatttcaatgataataatagaccaaattttttttttttattcaaggacacttaatttttttgggtctggtgtggcaccaggtctcgccaatatttgagccggccatgttgcttaagaacaataagaaacctactattagtcttttattagttttttttgtgtgactgtgtgtgtctctactattgttagtattagaattgaaaagaacaatgtaaaaacagtatatgtattattactgccctattagtcttttattaaataaaggttgattattaggttagacattctacatttaaaataaaaggaatctctttaagatatactccatctgttcttttttttttgattttctagaaaaaaaatttgtttcaaaaagattgaaaaaaaattgtttcaaaaaaattaatttttaaggttttttatgcaatatttattagttattattgatgagttgtaaactttaataaaaatgattgaataccattggtttaaagttataggaaattttaaaacacaaaaataatacaattaaaatcaactttaatatatttatcttaatatatgtgttttttctaaacaatcaaacaaaaaggaatagagaaagtataaaatagttttgaattagaaatgatttatggtgactaaatttaatagaaatatggtttttgcttatctcactttaaaagttttttttttttttttgacataccggagaaagtttaaaggatccgatttatcattgtttcactaaaaagaatcgactgcattttgagttgttttgtcttgtcattataaggaatgtgggtgacaggacccaccaataatagtttagtggcgtgataagaatagagaggtttagattttatcagccacattcaaagaaaaggcaaataaaaagaatcatgaaataaagaaagacttgtaatgaatattctttacaagtcttgtaatgttgttgtaaggagtgaaactaatataaagaaagttttgcaggttcccacatgtgcctggaatctattcagatgaacaagtagaagcatggaagcaagttgtggaagcagttcacgctaagggaggtttcatcttttgtcaattatggcatgttggacgtgcttctcatgcaggtttatatgtctcctcattatccactcgtaaatcttataaaggacttggaaactttataacatttttgagtctttgtatagtgtatcaacctaatggaggatcaccaatatcgtcaacgaacaaaccaatctcggaaaacaggtggcgagttttgttgcccgatggttcccacgtgaagtacccgaaacctcgggctttagaagcttccgagatacctcgggtggtggaggattattgcctttctgctttgaatgcgattcgagctggtttcgatgggattgagatccacggggcgcatggttaccttattgatcagtttttgaaagatgggatcaatgaccgtactgaccaatacggaggatccattgcaaaccgttgtagattcttgaaacaagtagtggaaggtgtagtttcagccataggagctagtaaagttggtgtgagggtatctccggctatagatcacttggacgcaactgattctgacccactatcactcgggctagccgtggttggcatgctcaataagttacaaggtgttaatggctcaaagctcgcttaccttcacgttacacaacctcgctaccacgcctacgggcaaacagagtctggaaggcaagggagtgatgaggaagaagctaagctaatgaagagcttgaggatggcttataatggaacctttatgtctagtggaggattcaataaggaactaggtatgcaagctgttcaacaaggtgatgctgatttggtttcatatggcagactgtttatcgcaaacccggatttggtttcgcggttcaagattgatggagagttgaataaatataatcggaagacgttttacactcaagatccagttgttggctacacggattatcctttcttggctcctttttcccgcctctgagtttgataatcgaggagaaaatgtattgacaatacattgatatgtaaaatgacaatgttattgttatccacttaatatttagtcatgtatcttgttgtttatctagttaaaatcttcatggcattactcaaggttttttgttaatggtgtagtgataagaccgaaagaatagcaccatctgttccattagaaagtgtggaaaccggtttagcatccgccattagaaagtgtgataagatctgtgacgtatttcatttgagtgagatgaagtcaaggaggtgtccgagtagcttccataccaaggaagtaagagagctctccaagatcttttagagagaacttggatgccagaagatcagtgacccgagtaatggcttgtagagaggtgccggtgatgacaatgtcgtcaacatagactagaatgtcgatgaacgcagaacccatgttgagaacaaatagagatgcgtcggcaagcaaatttttaaaaaaaaatcatgaaaaaaaagaagtcgctttattttggtacatatttctgtaaaagtaaattgtatatcacatcgacacggcttctcgttactcatgaaagaggcagaagcaggaaattttcaattggatacaatgctgattcttttgaagctggcagctaagagcactctaagagcatctccattgggagtcgtaattaaggattcctttcaattttataatattaaattttgaacaaattaaagtttaaagtttttgttgaatctttataattttcattgtccagtagtggagtttttaaatgagtttaatatatatatatatatattatatatctataatattataatttttttatttcaaaaaacataataattatttgaaatattaaaattgtaaacatacataacataaaaacaaaacaaaaatatataaatgaaaaccttgaaagacgataagaattaagcttgattcggactaaatgtttgccatatatgttcaactaaatcagctttcaattattcatgtttaatccaatcacgaagtcgggttgagtaatccttaaaaagttttaataataaagtttggtaaatttgaagtttagagttttgttgagtatttacaatttttattatccaatggtggagtcattaagtgagtttctgtgataaaacataataattattagaatcttaacttataaacatacatacaaatatttaaaacaaaaagcaaataaaaaactcgaataagcttgactcagtaatatttttgtcatatatgcttaaccaatttgaaatttgaaacaaagagaggttgaagaataagagagtttcgtagtgttgtgagagaaagagagagatttgagattttataaaaaaaattactttgataataattatgagaaaaaaataaaaattcgaaccaatcaaaaagcgacatgtcagagtttcttaacaatccctaaacaccttattttaggatcaatccttaacattaacatgagttttgatttattttttgagctttattcttaagaatttcatctaagaaacccttaagaaacaccaatggagatggttttatctctattgttttaatcatttaagtatatttagttatttatttatattgttaattacaaataaaaaaattgaccaattgcatttttccacatctcatgtgggtttctcgtcacactgaagcaaagttttttttagaccgtatttctctctttcttcttctctctcttactttttcaattaatttttattattttatttttaagggactcatttagaatcaccgttaagaaagttattgacggcgaatttggttccctcaattagaatgccacgatacaaaatccagtaaccacattctctttcccaactccccactttctcgatttctcttcccgattacattcttcttcttccatgattcgtaccgcctcactctctccatatcttatgggctcgattctctcttcatcgattttaagaactgaaacaactcatcgcgactagtaaaaaccctctgcagagcgagatcgagtaactcattcaaagtaagagatctggaggaagaaagtagcaacctctttagatctggcaggcggctatgggcggggtctttcgggtgagacggtctttcatcgaactgttaggatctgatcattttttctttttgcataatgttaagatctaaatcttttgttcctaacttaaaacttaatcttaaaactacaaaacggttgtgatcttttgcaacacaactaaacatttcgtaggcttgagggcaaagagtccaaaaccaagagaaataatacaaaaggtgcatattccctgagttgggcttctctctaaagacaatgaaaccgaaaatgagtgtgagaaatagagagattgtgagatttacaacagtagtgataggataacaaacatgtgaagaagacgaggaacaaaagtatcatgttaagaaagaagatgcaaaaggcgactccttatggcatcattagaaatatgaaattcttcttctaaattttgtttggatgtgtgcatattttgtccatgtcatatagcatattttctaagttaatgttatgctactttgtttgtttttttctaaaacaatcaaagttttaaaggtaccttgaaaagaaatgttcaaaaacgttaagacatatatgcaagcatgtgaagaagacgaggaacaaaagtatcatgttaggaaagaagatgcaaaagacgactccttatggcatcattagaaatatgaaattcttcttctaaattttgtttggatgtgtgcatattttgtccatgtcatatagcatattttctaagttaatgttatgctaatttatttgtttttttctaaaacaatcaaagttttaaaggtaccttgaaaagaaatattcaaaaacgttaagacatatatgcatggatttctaacaaaaactagaatgggtatacatgtattactcatctactatgtataccaacttagtacaccctaaatcgtgcgttccttaatagaactcttcacaattaaaaataaaaataataattaaaagttaaaagaaagaagagagaaaagctcttacataagaggcagtatcacaaatcaaaagacatgtatagctctattagtaatctatattaaaaaattagaatataattgtataattaaaataatatttttttttatgtttgtagaacaacaacatttttaaaattattttatataggatatatatgtatagttttgttatatatctatgtgttttaaaatttttatttttatttaatacgatatttataatttccttattattttatttcatttttgaaattatatataagatatttgcatagtttctttgttaaataaataaataaattttgtttaatacctgtcaaactatcaaaatctaagatcgattagtttgacacgtgaaactattttatgaattataaattttaaaaatcatattaaaaataagataataaaatatataaataatattacttaaaataaaacttttaatttgttaataaaaatatctaatccgagatgtgccacggatcaatttctagccaatgatttaatttgcgtgaacattaaatgaccattattaagtaaaagaaattgctcggatggtaagagaagaggaaaacaagcattgcatcggttggcgcgaaatcggcaacaaaccctaatttatccaaccgacccttcctcttcctcttcctcttcctcttcctcttcttctcctacctaaaccctcataaaccctcctctctccctttctctccagattacaatttccatgacgattcttcgatctcgcgaaatcccatctgtctcacccaagccactccctaaagaatccgacactgagccgtcgactcccgctcgtacactagagcccgaacttcaccgctcgccggatgagaccgctcctgaattgggtcttgttgatgaacccactcacactacccggagacgtagtcttcgtcttgcacaccaatttgacggcgatgattgtgtcactgagaaagaggttagtgtggatgaaaagtttttgagtttgcgttcagggaagagagttgctaagagaggtgtcgattatggaattgaaattgagtctagcaagtttgatttcgatttaaagttaggagaaagtgcgagtaaaacaaagagggtttgtgtggatttggttgaagaaactattgtgaagaatgaatcagaggatagtgtggatttggaagataagagtagtagtggtgtgttaggtgactcgttagcggagaagtggtatgtagtagaagtagagaatgagagcaataacaaaggaaaggggataatggaagattcctatggagaaagtgatgtgatttgtggtcagagttatgagaagcagagtagttctatgggtagaagaagatatactagggaggagaagggaaagggtattatgcaggtggaggatgtttcttctccggtaacggttgagattgtcgaagttgatgaagaagaaatggaaatcgagagcttggttaacagtgagaagcccccggatgtctctgtaacagaattggctgcgacgatggctaatgttgagcaagcgcagaatcgagaaaatagtaatgagattggaaacgattcaagaactcagcactttcgtgacattgcagagaggattgctcacagatttgctcattttgatgctcaagtggaggaagaagaggatttgtcagataaagagggggagcagcaggtcgaagattggccgggtcctttctctactgctatgaaaataattaaggaccgagaagagtacacgactccgcatgttggtattggcgtctccaacaaagaaagatcttcaccaactatttgggttcccagaagtaactttagtttcccccctcggaaggctccatctctgcaagaattatccttgcgagttcttgtcaagaatgctgatgccatcacttctcttgactatgttccagacacattgagggtcaaactttgtcaattgctttgtgattctaggagaatggacctacactttcttgatcttcttgtccagggatctccaacagaaatttgtgttccagattgctcatggctgaccgaggaagagttcactgaatgttttaagaactgtgacaccagcaacttgatggtaacttattttttcctgtgaagacaacattttcagtaccattttattcctgtagttaattggcttagattggatattgaaccgtatatgaggttagctgcccgttcttggaaaataatgatactgacaggaataaatcatgataaacatcttgtcacacctaagataaagtttttcatgcataagatgatattaaagtgttcattgtaacttaagtccacattcgcggattcgcctcctttttgaaacaggttcttcaacttgaccagtgtgggcggtgtatgccagattatatattacccttcactttagcaaggtcaccaaaagtgttgccgatgctatctactttatctataagtggtgcatgccggctttccgatgtggggctacgacaactggtttcctctgctcctgcgattacgtctattaatctcaaccaatgctctcttctaacatcatctagcattgatatgttatctgattcattggggtcagttttaagggaactgtatatcaacgagtgccaaaacattgatatgaagcatattctcgcagcattgaaaaagtttgagaagttggaagtattgtcccttgcggatcttccttctgtcaagggtcggttcttgaaggagtttgttactgctagaggtcagaccctgaagcagctgattttgaccaactctcggtatgcctcttgaatttccttgttcaccccctttgattcagtcactctgaattcttaccttatttggctttgtgaatctgttgcaggaagttatctgattcttctattaaagtcatctctgaaaactgtcccaatttaagcgtccttgacctggctaacgtatgcaagctgacagattcttctctgggttaccttgcaaatggctgtcaagcgttggagaaattgattttttgtcgcaaccctttcaggcaagtctctatacccttctgtattcatgcttactggaagattactatctcattccaaatgttcatgttatactggtacaaccgtacagtgttaccatttgatatggtgacatggcctgttatatataagaacttatggtgttactttgttaaacatatctgccactatgttaattttggagacattatctgttttctatattcaaatcaatacacatatagtcatgttcttgtgaactgtgtgggctgtgttttatgtcaaagttaaccgacgcttcttatgtctctatagtgatgaagctgtagctgcatttgtagaaaccgcaggtggttctctgaaggagctatcactaaacaatgttaagaaggtaaacggattctttcccacaatgccaccaatccacagatcgatcttaagtcacacttaaacatttgttttatgttcaggttggccacaacacggccctagcacttgccaaacattcagataaactgcagattttggatatatcctggtgccgagaaatgtccaacgatttattaggctacattgtcgataacagttcatctctgaaagtgttgaaggtctttggatgcagtcaggtaaaaaactttaaaacccaaaagccctcgtctccttcgcaaagaaacggacatatcctgataaagaaacctatcttttctcttttgcaggtgacggatgtatttgttaaaggtcactcaaatcctaatgtcaagatcttaggtgtgaagatggatcctttcttaggccacctttctgataactgaaagaaactcgaaatctccctctgctttgcttcttttttggagaagtgcagagacgatttttactaattgtccaaacatgtggtttatctttgattttgtaatctagtatttattaaatcggcaagatcaaagtttacttatgtttttgaattcgaattagtaaatacctttgatgaaccatgtaagtctgcaaattcatagcgattttcgatgttcgagatatgaatccaaagccaaatatatacttcttcacaaagcacacacaattgtacatgaaacttggacttaatccccccacacacacacatttcacactatactttacatgacaaacaaatgcattaacaagtgagccacgagattcttctctcccattctccaaaacaaaaacaatcaagaaagggcagagagaaccaagatcgctttcgtgtgtgttagcttgtgtactggagcaagtatgtatcatcatctaatgattcaaatttacctgtttcaacaatctggtccaatcacagtatatgtgtcaggtcatgaaaatcaattagcaacttttagagtaaggaatttgagccttccttaattaccttaaaaccggtcttctggtataattcctgagcaactgaattgtttttatgtacatgaacatatacttgttcaactcctgcaaccaatacaatccacataaggtttagatcattctctacatatgttgggacttatttaacagcttagatacaatcattacaatgacggccattttctttatccgtttaacattatttaccactcagtctggctgattcgacagcgaaacgtaacatgttgcaagcaataccctggcggcgtgctgatttcgcaacacatagattagcaatataaccatacctatttgatccttcctggtttatgctgcagaacaattgagacttcaccttttcctgcacataatgtaaacttattaggaggcttttgatacacacacacacacccacgacaagaaattaacgaaagaaatatataccccaggaaaggtctctccctgcaaaaaataccgaatactcaaatcaagcgtcccaaccacacttttgattactgaacgtttaatatgcttctcttccttctttacctaataaacacaacaacaaaagcttgacatacacaaactctcaaagaaaatagtccaagttacttctttttttgtccaagttacttcaaagtgcaaacagtatatatttaccgcaacgatacatgagcatttctgtccttgcatccctttacatcttcttttaatagcattaaactcctgatacacaaaaatagtaattggtacatatcatcatcctttgaagaaagtatcatccacttaaagaaagagatcaaattgatatttagcttctacctgctctgcaaatttccttttgtagttatcaacatatctgtgttttattaaagaacaacatcaatcacacataccaatcatctccactcaatctaaactacctcaatacttcctttaaccaattaccaaatctaatcaatacaagctacaagattactctaacaatatcatcttctttgtgcttacaagctacaagattactctaacaatatcatcttctttgtttgcttacaagctacaagatcctttcgaagctaacctttcattggagcgatcttcccagtgactctctgcacgaagccaagctgcagtctaacacaaactcgaaccaacacaaaatcaatcagccataaacgaaaattgattgttaggtcaagaatttgagtgacattacccaatattcttcatcaagcatagcttctctagctacgaatttaccaaactcaaatctatcttcatgaccaaactctggctccggaggttgtaaacgatcgaatctcaaaccttcaggtcttgattgatcaacttgaggaggaattgatatttgtacagagagttcttccttcttagatgtatcagaagatctcgaattgattgttaatttccaaagagggatagttctccgatatctctgccggaagattcgtgaccgagcgtgagtgattcgtagagtctcagtccgatggatcgaaatcgtcgacatcgccgccgtaccagaaagcaaagtttgacctgagagagaattttagtttaccgtcaaatggataaagatgataatgaataagggtaatatagtcattttccgcctgggtacaaacgagttggcgcgtttgtatctaacggtcaggattctgtgacgtggcgaattgaaaagcgtagattgattggacttttgagaagatggtatcttgcgggacctgacaattggcatctgttatttttaacctccacacaaacaacttattttaaaagggaacaatgaaatactttagaacagctcaatattgaagtagaaaaatataaagttgccgacgtttcattatttatagttttttcatttagatttttcttgaattaaactggctgtgaacgatacatgaaactaaacgcctaattgccgacaaaaaaaaaaaaaaaaacgcctaattgaagaaagttatactggtagatgaataagaacatctccaagaatgtaatgaaattctgtagaaactagtgcgaaatcgaaagatataaaaactactctttcggttccttattatttatttttttaaaaatatatatttttaaaaagttgatttttaaatttttttatatactatttattagttattattgatgaattataaacttcaaaacaaataattaaatatcattggttagaattataaaaaactgtaaatcacaaaaactaatacatttatgatcagttttaatatgtatgttttttcaagaagattaataaaaaaaaaaaaagaatatacgaaagaaactttaaactcgaacgaaagaaatcaaaacttaagtccaaaaacacaagaaaaataacttagcccttagaaagacaatagcctaaaacaactttttcatctgaaaatcctataaacgagatttaccaagatgtccgcaactaagaccatctccaatggtgagagccctctctcttccattcttcaatattaattgtgaaaagttgtaagaagagagcttgtatttttttttttgaaaaaatttcataatccagtggtagtgaagtggggttctcttcaaaatgtttcaaattgttttccacaatctgtagatctcaaaaagaaaaatcaataccttgctaaagaaaacaatgttaactagtttctttctcttaagaagtatagaagtcaaaaagaacatatatccaagaacacaaagaacaagtcttaagaagaacacaaagaacaagtcgaaaagtcaacacaccttcctcttaagaagtacagaagcacaaatccaagagactcttgatcagcttgtcgacattgctctgtgaaagagaaaccaaactatatgagcaaagacggtttacttcacataaggagataaaaaatggcagtattccttaccaatactagtccaggagcacaaagattaattcttaatgcagtaccaataaagatcacaatcaattcaaaaacatataaaactttctaataagatcactttctcaagttcaaagacaatgaattcttagctaaggaatagtgtgcaggaaagtacagaatttcaaatccatcaccaataagacaaggagaattaggacaagttttaataccttaagacaaatatggttcgagagaagcgacaacatcaacaactgaagggttcttgtgaaatcataaaacttttgtgtcaaagctgaaaataaataaaaagagcacgaagataattcttctataaactcttactaccacacagaggagaggcgaaagtaagacatcaaagaggagcttaagaagaaaaacaagcaacgaagctttagatcattgtttaagttcatttatctatcaccattgtctatttagtgatcaataacaagaacatcaaatccacaattctaaacacttcgaattgacaaaattaaaaggcgaaaaagctgcattaagctcgattgatgaagaaatatggaaatggatagtgagtgattcttaccttgtaagcagttgcaattctcagctttctttctaacaacgccgagcacggctctctcaccctctcaaaactctctgaagagagtcgtctttgtggttttgttggaattgtatctttgattgaatctgcaaaggaagaagaagaagatgaagaacagaggaagaagaagatgatgtcgtgaagtgaaaagtcaaaggaagagaagaaagtcaacaaacatatgggctttgtgttttgtaataaggttgtaatgggctgaagatgatttaggcccaagtatgtttagttaaagagtgttgtgttgtaagtctaagggttagagtagaagagtgaatcaaggggtgagagttccaatgcatgtagggtggctacttgtcttgtgtaagagccatcattaggtctaagtgcaagtttgcaagtgtgtgtgtgtcaagtagaagtagtatatgtagagaaattcccacaaatagcacactttaaagttttttggacaaaaatagcattacaaagttttttagacataaatagcactcaaataattatttgaaatttttttaaaagtgacaataataaaaccacaattttatattaaatctattcaaccaaaataaattagaaataaatttaaaatgttatatttaggttctctatttccaatttagggtatatatttcaactatttaaaagaaattttgattcattttaatattagtttatgatattatatttgagtttcctatttccaatttagggtatatattttcaccatttaaaagagatttttcattttaaaattagtttgtactattatatttgggttttttattttaatttagggtatatatttccactatttaaaagttttttgatttaatttaatattagattagtgtttgctctcatttttatttgggagattgatacaaatggtaataaaaaactttattatttaattaatttatagagaattaaaaactttatatgctatttttggaagtttcaaaagaatgtactatttttggaataataaagttgttttgtgctatttgtgtcaaccccgtatatgtatgtgtgtccttgtgttatgtaagtgtatccaagtaattaacaatgtagtctttggaggaaaacgcttttgtctctctctagaacaagaaacaaaatctgtgtaagagacaagagaatagtaattaacaatgtagtctttggaggaaaacgcttttgtctctctttagaacaagaaacaaaatctgtgtgagagacaagaaagcaagagatctaactaaagtggttagatatgtgagaattacaacaggtttttttttatcagtttagctttattttaattactataattcaagagagccaaccaaatttgccaagagaacctcccattggaggtcccttctcctatcctgatgacaaccgaactctcaaaactagaaaccaaagacttcataaccagacaagcaaaacttgtagtgaacaaggcacaagtcattgtttatagttttatacgtatgtttttattttatacgtaattttcattctatttcaaggtaaatgtatagattaggtccaagtaaaaaaaaacgaaaataatcttccatctaatatctaaatagattttgttacaaaaaacaaaaataaagatgacaaaattgtagcgttaaaaatgtttttttttaagtgaagagtaattactcaatagaatacaatacagattgtaatatactaagaccatttccattgggaaactcttaaaagagtttgagatactctctatatccaatcatgacatttttctctcttatattggttcaattttttcactatgatataaatttaattatataatcaaaatataataaaatattaatatttttcttttttgagaaactttttgtttctcattgatggagatactctaatattattcaaccaatacgattacgaatacaaacttatgatgtttgttctatacaaaataacacacgagtagcaaatagtattacattactaaggttaattaattaaggacttacttcaaacctaaagcctcaaggacttcgactgaatcatgttcaatatcagtttctccaactttgttccaatcaatatacttatccactggatctgcttcatcccttgtgactatagacgataagttggtttcacgagaaaatgtttcttgtgtttggctagtgcttgaatcttgtaatgcattgagctgagctttaacaacttcaacagtattgtatgaaggatatgaactcatgtacgtattgtgtgacacagatgtcggtattgcttgtagtgtcgttggaaaaagaattgtattgtttaaagtgtcctgaaaaaaaaacatcacaaaagaaaaaaaaaatctatgaatatatgttattgataaaaatattgaaactatcaaatctagttcatgtgctgaaaaacattagtaccattacctgatgaagagaatcaattgttggtggtaccgtgaccgataaaaaagttgcattgcaatatgagtcatgattgacacaatcattgttgagctgaagttgttgttgactcttgtgaggcatggattgtgactctatagacatatatggattgataaaactttgagccatattgtaactttgattgtcgtcgttgaactgtagatttccttgagttggatgtattgatgcctcatacattggaaatgtattccttgcgtttaactcactcaatgaaagacaagccataccgtcgttgcaaaaatcttcgacagaagtggtattttgtggaatggtgatagatggttgtagttgtgaatagttcattgtgaatggatttgtctgtcctccggaaaaatggtatgaaaatggtacgaaccattgctcttgtttattgtgttgactaggtaaagttgaagtcatacttgcctttaaatgttgtgtctcgaacatattgccttgattttttgttgctaatgccttttgcattctttgttcttcgcgacatctttgtaaacgtaaatcgttctacaaaatatttcaaacttttttttattacacatgctaaccataaaccatcacacatatatatgtaaaagttaagatactaagtttacctctataagcatgtagagtgatccttggacttctttctccttttttggttttggttttacagctcccattaatctaggttgtctactcaatatgttaactctcataagattttatagaatgattaaattaaaaataataataactctaatataaatacataatttttttcttacatatttacttgtgggcgatgtgagtttaatgaagcacatgtttttcttatttcacgagcagttttaaaaccttgagaaacaaagataaaagacaagacaataatttcttttggttacttgtttgaaaaaaatatattttatacaataagataaacaaaatacaatcgcgagtagttttaaaaaacaagataaatggcacgacattattatgtttgggcggattttgatttaacgaaaaaatgattataatgttatttatatatatgaaaaaataaaaaaaatacaataagaaaaactgaataacagttatttatatgatttcttataatatgaattaaaccattatgtttaatatcacttgtctttagttaactaaaatattaaatttttaggtattaatatgataccatgaaaaagacacatcaaccaaaaataatcaaattttaaaatttaattatagtggtcatatgagtttttttatatgtcataaccttatttaatatatgatattaagaaatatagattgaaaaagtcgtaaaaatatattcctaggataaaacacttaaaattagtttttgatgaaaaaaacttaaaaatttattttcaattaaataataccaaataaatgacaaaataaaatataaatttaaggcaatgatgaacatacgtctaacatattgatttgttccaccccgtatgttacactttccaagtctaaatttctgaaaatataagaagacttaattaaacattaaataaattatagacaatcaaaatctaattctgagttatacgcaaaatataagaatataaataattatctgaaggtttgacaaaaaataaaaataaaaaaaaataattacctgaagatgactcttcacatggtgaagtgcaattccttcaacttccattgcctctttaacactttttggcgtcgcttctgcaaaaaaacagaaatatttgtgaaataagttttgtatctgttatatgtatcaacacctatttacatataaacttagtaatctcactaataatgcaaaaattattttggatgttttagccctagaatgtgtaagagtcaactattcaaccatacatatttttaatccattgtgtaaccaaaaaaataaatcgttaccaatacgcgactattttttcaaaagaatatgaatgcaatgacgcgtggtaacattatgttattgttaaatttgacataaattaaaacgacaaaataatgatcgggcataacgaaaaatccaaaataaacatatttgaacgcataaaaagttattcgccgcaaagaaaatgttggataaatcataaacattccaagtttgttgctaaaaaacagaaatgaaaatcatgattaactacttaaatatcttaaatttcatcaacacaaatttaaagtttaggtcaacaaaatagtgttaaaagtttcaattttcaaaataataaacatataaaaaatgaacatatgtaaaatatttgatatcagttaaacttctaaagaaattttaatcatgccttattctggtaataaccaaaaagtgttaaaataattatgaaaatgatctatattgaaaaatgatccaagttaaatacaactaaatataaataagatcaagcatatatatcatttgtttatgattgttatgcaagaaaaaaaacagaaatattatttgtttatgactgtctgcaagaacacaaatcacatatatatttttaaattatgtaaagcgaatcaaatataatctaaaacacacaaaatagttgtagcgttgatcttctttttcctcctaagaatatatcataagatcaatgaatgataaaactgatttttttgaatataaacttttatatccatgtaactgatcacaaatctataaagattaatttcaaaatagattacatgcatgtatgtattcataattagtcataaaatccaaagaaaatatggagaaatgtataattttatgatagataaaacatgcaatgtttaaagtaaatcaatataagtgaagaaatattgaagaaactcaagaaatataaactaataatcggaattaagaatttaattaggttactaactgttaggtccaccaagtttttccacagcattaacaaagcaatcgtgaaggtcgcttgaccacctcaatcgtgccttttcatcagatgtgtagaaaatgcatggcgtgatctttgaagatgaaccatttccttcttcaataccaactttctcagcattctctttcgtatttttttctaatttttcattatatgtctccttattactttgtagaataacctctatttcttgctcacttaaaaccattgaggcttttttcgtgtgatgatgaacataagtgctaggattttcttcgaaagtgacaacttcgtttcctttttcttgcttcttcatctcttgggaactcattgctagcttcttagtcgtttttttttttttttttttcggtttgatttgttttcaagtcagagtggttgagagcactacaaaataaaaaagaaaacaaaactaaactaaactaaatagaatcatgatttagtggaggaaaagatactttttaaaatctcaagaacaaaagattcaaggttgaatgtacagtaactcagagttaaggtaacaaatgtattcacatggaaggagataattggtttgtgatttttaaatgacacaagaagatcaaaaaagttaggacctacacttttaaaccaaaaaaaaataagttaggacctaccattttaatatggttacatactcatttcagagaatgccaaaattgttataaattaaaagttagaaaaagccaagagatattgaaaacggctggctagaaaactttttttttggtggtgtataatattgaagttgacaattttcgaatattttttgaactttgctaaaataaaagtaagagaaaaaccaagttaaaactaaaattttgatcgtatataaaatgtgtacccatgtgtatgtaacagtaattatttgaaaatctgttttataaatttatggttcttttcattgaaatttagaatttgaatgatatgtgatatttaaaaatttaaatatattgaaaaatgtagaaatgttatattgtttctaattagaaaaataaaatgaaaactgcagcaatatagtaatataagaaaaatataaataaaatagaagcaaagaaataaaaaaaattagaaaaaatagtatcatatgtttacgaaaactatgagttaataatttgtgagaattaagtcgttttatctacatcaaaatctaatttgcatattgtattgcacgttattgaggcaaaaaagaagtaagacttctatagaggttatttttaatttctaacatcgccaaaaaacaaaaacgaaaaaacgtaaaataattcttttgatacaatgatggttctaagcaattgtagggaacatggaatatattttcatatataactaagaaaataaatgatattttgtataacaaataacgtattatttataaaagtaaattcagtgtattatatatcttactgaaacaagtattatatgattaaaaattatttgagcagaataaataatcctaaatatggtgttatctagttagatgatttttattttattttttgaacttaaatttagtcctttgggatgctgctagactagtagtttcttttgcttgtttattatatgtttatctttattacaaaacagtcactatattactaatttactaagtactaaactactaattgaactattatcataaatatataaaatgcatattatgtttatatttttatattgcttgtctaagagtagtaattttatttgtgcaagtatgtatatagtgctttaaatgcataaaataaaataaaaattaatattagacaataatgaaagaacaacacaaaattgctgactaaatcacctttaattgtaacaacttttatgtttctttatacttaatgcatgcagaaaaaacaacttttcaaaaaaaaaaatctagattttaatatcattgtaaagttactttaaaccttttttttgttattgaatatgcatggttatcatagttcaaaataaataaatagacaatgtaaaaaacatttatgtcgtgattttttttttttctcctcatttacattgttaagaaaaattatccacatgttctttatttttttgtcgtgttcaatactttaacttttttttttgtcttttagtataagattttgaataaaaaaatttactttgtaacggttataattttttgcattatattattgatctaaatctgtataaagttatgtatgtggcatttggagttggaagtgaaggaaaaaggtggattttatggatgcaatgtcaaactgcgatttgtaactttaataaagagtttagatttatatatatggagacattaaaaaaagcaaaatgattccaagatttgacatatggtatataaaatgataaatattttctaactctacttgggattttttttttgtagattagtttaaagatttaagttttattttactaaatattaaatgtacaagggataacaataaaatttatatcactcatattatctctttccaatatctttttcttgaatttttaaaactaatatttcaaattaaaaaaaatatgtatataagttttaacatcttattatataaaatacggttttgaaaattactaactcacgagatcataacacgtgataagtctaatgataagatgcttacatgtgtcattaaacatttaacctttttattctctaagagaaatagaaaacctaaaaaagtaaacaaatttacatatattaatttttatgtctacaaatatatacaattatttttattaatcaaaaagaaaattaacaaatttgattacatgtgttattggtcaattaaataaatctagcatgtattaatttaaagccaaatcattagtatggataataactaattaaaaagaccgctcaagtttaaaataactaaataatttatttacattaatttagttggataaaattgtatttttcaatgtaatattagtgaaaacaacaaaaattaggaaaatagggcttagagggattgattttttattatttgatgaaaatgttaatataatttttttgtgttttatttataaattctaagtcatttcatatgagtttgacattaggtaaaactaatttatgagattatagaatataggaaaactatatgttgaacaatgtttcttttccaaaacattttgtggttttcttttttggttcattatgtttttttatttgttaaatattttaatatgaagtaattatattgatttgatatgttatacatattattttgatataaaatttaacatttatccattaaaataacatgtgcataatcaaaatcgggattattatgatgaaataggtagtcaattgtatagccaaatagaatgtgtaagattaaaattttatttttagcaactttacaatgcttttaaaaaactttacaaggttttttaagagattttaaaggcttcttaaaaaatcatttaagaatatgcggtgaaaaaattaattataaattttcgctattgagttagccattttcgttataacttccgagtccgaggtactatggctgtagaatcaaaatcgggattattatgatgaaataaatagttaaattgtatagaaaaatagaatgtgtaagattaaaattttggtttttagaaaattactaaacaaaatacaaaaaaatgtgttgactactatttaaaatttcaatatcatcaataagatatatttaaagtcactaagtacataccaaaatgaaaattgtaatattgaaattctattcaaaacaaagttactaaattaaatatttttaaaatagggattatcatttactatttagaattcaaatatcatcgtaaaagtttataattgttttttaaacccgcttatataggcgggcctaacctagtgttaatataagttttactatttagctacactaatatatatatattcacataaatgatttcatagtataagaaataagattcactctcaaatctctaatttacatttgtactttcattgcaatttgatcatttcggaaccatctacaaacctgcaaatccaaggttttattttagaaaacgctatgccatatactagatttggcatatacattatctaacctaacttgtatcaacgatccaacgattatacatttctttagatgcattgtatgaacgtccatcaaactagtgattaccagatagtataataactgatgaaactacccactagtgcttgtgctttcagcatatctctctgaagcaaaatcttatggacattcttatgttttggttgtgaacaccaaagtgcttgtgctttcacatgtttgccttctgataatgcaagatctcgtcctcgtttgcacacgaaaggtacctgaatgtaacaaaaactagtttgatcagatctagtgactagtttgaaagaaactacataagaccgacacttacggattggctatagataatctgaatgggttacaatggcctctactctgtctagtgatgcctctaaacgcccggagctcatgttgaataacggttcctcagtaccaagggccctgtttcattcatcagctaagcattgtgaccaaaacacaaggccaaagtgtactggaatacatgaaagcttgtgacttacccagtaacctctgggagtacaaaatcagctctccatccaaaccggaaatcgataccaggactaagaccaagagtagttttatttcgaatccgagacacaccatctccacccaaacatgaagtaagcttccatttccaaccaattgcattcatttgaaagttatgtccaacaccaacctgcatatgataagattacaacacatgtatttccaccttccacaaagagacacaagaaggcatacaacaaaaaaacctggaggtttagaaatctggtgacaggaatcttcttcgataaaacacgaacttcttggtgtagcggctcatatataaacttccacttcctttctggacatagaggcttcaaaacaagctttgcgtggtaatcattcgtgggttcgttatataactaaacaagtccaaaacaagacaatgatgagacatctcatagcttaaacatcacaaaaatatatgagaatgcatcaatacataatcaatacctaataaaccaaataactagatccattatccataaattttcaaactttacaacttcaaaacaagctttgcaatgtgatcatttgtgggttcgttacataactggaaaatgcaaaaaaatatgataatgacgacacatctcgtggctcaaaaatgcaaaagaacataagcaagaatgcatcaataggtgaaccatctctaataaaactgaatccttatttccacacacaaatcaattattcataaagttccaaactttacaacttcaagacaatgatgagacatctcatagctcaaacatcacagaaaatatatgggaatgcatcaatagataatcaatacctaataaaccaaataattagatccattatctataatttttcaaactttgcaaatgtgatcatttgtgggttcgttacacaactggaagattatccataaagttccaaactttacaacttcaagacaagcttcgcgtgttaatgattctcggtttcgttatataaaagcacacacagtcgaaaaaacacagtgatgacatctcatggctcaatccacagcacaaaacaagtctctttgaatgcatcaatagatgaacttatgcctataaaccgaatacttaaccccaacactcaaatccattatcattaaaaaagtttcaaacttcacaacttcatacccattttattagccagtaagaagaaactcaaagttttgttgaacatagagaaggaaagacctcgagattgacgccgacgcgaaggccttgaagctctttgcggaacttaaggaatagctccgatggcataagattgattttgtaaaggtcctcccatgacggaggttcctccggtctcgaactcggcggctccatacaaaatccaccgctcaaacttatcccaacaaacaaaacaatgattttgaggtttttgttctcataaaaaattggttcggttctggtatcagtacaagttaccggtttacgaaaaccggagattttaaacaaaccactgaaccatcttattacgttagacactttgaaaaaaaaaaaaaagattttatatagttttcggcgttcggtaatccattcggtttctgttcgtatctattcggttatcggttctttcggttctaaagtgtagtatatattcggttattttaaaatttcggtccggttccggttctttcggtttaaatttagcatatatattcggttattttgctttgaatatttttggatatttcggttatttttggttattttcaagtatttttactattttttatacattttcaaatatttttaattatttagtattgaaataactaatacttgtataattatatttcggatattttcggttacccgaaatatttttgttcggtaccagttcagttttggttattacgattatagaattttatatccattcagttattttcaaattttcagttcggttcggtttgatattttttcttcggttttggttcagtacattcggttcggtttatttacctagacctaaattttaatataagaaaactatttcaagagaaatgtaaaaaaaacaaaagagccgtttactacacaaacttctttccgtagacacattccatgatctttatagttacaccatcaaactttagagattatgttaaaaacctatataagctttgattcccatattagaattaaggttgctcagacgttgttgtctcaagcatctgctttctacgcgtgcttgctacttccttctgtagttctgagttcgacatccgttccacttccaaagctctctcaagctgatattataaacaaaaaactgattcagtaatcaaattggtctactagaaaagattaaaggtttgtttcttaagattacattcgctgcccgcatgctccattcactcaaaattgccctcagtctttcgttttcttcgatatactgcaccacccgcaaacaagattacttaagagagtcttgactaaaatctaaatgagtttttttcctacaatgccggtttttgcagaacctggttgttggtactgttgacacgctgcacctctgcatctctctcggctattaaagaacgagcaagccgtagctcagactgaagctgattcatctgcattgttgagatttacatatttatagagtttttgttttatcatattatagagatggaagcttcagaaattaagtattacctcagctgaaagtgtcctcagctcttgatctcgagcagctaaaagatgtgcgagatcaacctatcaagcattattatacatttaaatgaaccaatgaggaattcagctatttgatatattataaaggaaaccagaatcctcacctgaggtgtgcttccatcatcagattgttcatatttgctaagtttctcttgcaagcacagaatctttgaaaagcacaaataacaaagacaagagtgattcagatactatagtggctcacaaaacagcaaaggccaaagagaaaatcaagcaacgtagatggaaaatattttaagaagagtgtttgtatcggtagcatcacttacctcctcgcttagaaaatggagattttcgcgttgatattgtaacaaagccgtttgttgatcagaaagccggccttcataatacctttgataccaaacaaaaatgaaagaagcaaacttgtacattatttgctgaagctgcataaatttataaaatcagatacattaaggacattcagtacctcaaaccttccatagaacttgacggctgaagaggagaatataatgacttcaagacatctggccgggaattc

SEQ ID NO: 179 - DNA, 104292 bp, Arabidopsis thaliana
gaattctgaaccggtatgtacacactcgccattgcccggctaagtgaggattaccagaaaccctagaagaaattgcagtggcgaatttttcgaatagagagtatgtgtgtgtgccaacgatgaagtgaatcgaacaatcgattacaaatctgtttcttttttatttgtgaccttggtttggtctgataagctcagataagaagttttagggtcaaatatgttaataataaaaagttaaggtaagagtccttttcttttttggatcggtgttactttctttttttcccacatatcgtgtcaaatatggtaaacctttaccaaatatgcaatgcgattttgaacttgaaacaacaaaaaatttaaattactaatctttagccaatttttatatcgatctttagtaaacggaaacggtcttaagtcaaatgatagaatatatggttggaatgccattatctcaaaaaaaaaaaatcaagaatgtcatttttctaatttttaattctttgttaaactaaaaataagaaaaaatcaaaacaattggtaaaaaactaaaacctagacgacccaaaaaagtattcgatccaattaagatatatgtccatcgatacaaaactcatcccaaacacttaagtgaaattcctgatttttaaaaaaacggctctcacaaaattcagattcttccaaaatcagattcctaatttttcggctttcacgatttttcgacgaattcttgattcgtgtaatagtttgatggctcgtgttagagatggtaccggtggccatgtatatgagtcgacggagaggccgtccgaagaagtttcgacatcacaaacagtttcttcagaaattgagatcgacggagatgccgccgtagaggttccgaccgaaccagctgaaacagatgtttcagcgaataagactccaaaaaaaactgctgaaattgaagaggccatagaggaatcgctagatggtgatgaggcttcttctaaaggaaccgccgatattgaaaagggtaagacataaccaccaacccatactgcaaaagaacctctacttgaggctgtctttatagaaatcctagaagcgaatgaaggtgatggggatgagctggaggaggaggaaatggtgaatacaacaaaagaaggagtagagaacattaattgtcaagtatatacattggaatctctatgactcacatttgttttgtttgagtattagttagaaatgttttagatacaactagttcatatgtgacaattgtttgatataagtaatttgatggaactagttcaatgagtacatatgaattgttagtttgatacctctaaattgttcagttggtcaatgttcattgaattcgcagttgcaggatacatgtgaggccgaggatgatgattctgggccagaggatgatgaggttacttgtaaagaaaatgaggaagatgaggctggcaatgatagtttaaaggaggaggatgatgaagatgattctcagccactggcgccagagaccatgtatttttcttttacagaatacgacaaagtgtgcaagataagcagtaggtgccaagtcacgcagatagtggcaatgatagatagaaggtttaaagaagaagcaaaatgatttcgaaaacacccacagttcaagcgtatattccacatgtctcaggagcctaaccaccaaatgcaaggcatgtgggtgcttatgcttcgcacagtgaagacagatttgctctaggaggcttggtttgttgtaaatagagtacctattaggtattccattaaagagcatgcgttgttaagtgagtttgattgccgtagttacccaaaataactcaagacaatggggaatacttagtttgtgaagaggatcttcaaaaaagaaactgggataaaggtttcaaaagttcttactaagtacgagaagatacgcagcggtacagataggttgaagttagtgctgttgtacttcctggtcaaggtagtaaaagcaaactcaaagaatgatggaaacatagaagagattcttttaaggattgttggcggtttggatgagtacgagacgtttctgtggggccgttaatacttcttggaatgtttggatgggataaggaaaatgatgaagaacgtggatggtttcgtgaaaccaaaagctcaaccttgctacagtggattcattgtgcctctcgagataagtaatttatgatcattatatgagtataaggtgtaatgtacaggttttatgatattaaacattgttttgttatttgtagattctggcttatgaggctattctacagcttcaactgaaatttagagtccctgtacgtgcagagaaggactgtccaaggatgtgcaagcataagtttaaagaatgtagcatgaaaggtgtcccgttggaagttatatataaagagcttgggaatagtgaggttagagtttctgtatttacttgattgtctgtatatcatgagattgcttgattgctaaatgagtttcttttcacaggatattgctagccatttggtacctgagtatcatgagaaatatctgttggacagtctcttagaagatgatgttgatgatgacctcgatcttatagatattgttattgacaattggaaagggcgactatttgtagagaagaagaagatatggtggaaaggaatgtgtgagctggacatttcttcttgatgtattgttaatgatcttgatgatgatgttgtccatgagattgagaatgaggtccccgagaaagatgtccttccgactgatgtccccgagaaagatgttcctccgactgctgtccctcctcgagtccctgaattagatgcagttgtggcatctataaactcactaacgcagatgatgaccaaaggctttgaggaaacaagagataagattgatgccattgatgggagagtgaagtctattgagttatttgtggcagatctgaaggaaaagaaacatggaaagcaaacagaggaggaaagtcaacatgggaagcaaacagaggaggaagtgttttatgcgtcgccagagggttgtgtgaccataaaaaggcaacaaccactggatatagtggtttatagagaaccttctccagaggttgcaaaaaatagtaagtacaataattaatgtcagttggttataaaaatatgaatataggacttaggttttgttttaaatgtctacaggtaataaggagacaaagatgacggataaaaggtgaaaggaaaagtgaagaagtagggcgggggcaagaagaagcaggatgtgccacatgtaatagaaacataaaagaagcgaacaaggaaagcatcccgccttattaagacaccgtttgtgggggtggatgtgaagcgaaagagaatgcggaagtctgattgattaactagttgtgtaacacttggtttattgaaaaacatttggcttgttttgcattgtaatgatgtttacttttacaaaatggttaaaaactcggttggtttaactggtttttaggtacatctatgtgtattttatgatcggtcaaattgcataacaggttcaactgtttattttggtatgtctaatctagttaatctggttcaacaacgaagttcaaatggttcaacggacatagttcatccagttcgactgattagttcaaatggttcaacctacatagttcatccggctcgattgattataaaatggttcaaatcgttcagttgaactagttctaatggtttacaaaatgattttaatataatagttcatgcattatattgaaaacccagatagttagcaaaataaagttttaaaaccacaatttagttttatcttacaaacttaagtaaaaaacacataatgttaatttcaactatcaaccgaatgtttattgaaagagggtatcaggaggattcttgacggggttatcatccactctccataaaaaatcatcatctgctcccccgtccccggtgctgtcacttgattctggccaaggtttgaaatacgggctcgatccatcatactcaacacaccatttccttagaggcagagggatgtcagctactttgtcgaatccgtaacaaacccaatctttcggatgagcctccattcgcctcatttcctctctccatgtcctgcaacttaacgagtagttgggcgtgacgccttcgatacgctgcatgttgattatccacctgtccaacaatataaatgttactttctcgcttctaacaatcaatacaactaaaccctaaaccatcaatacaactaaaccctaaaccacattagcaaaaacaactacgaaacacattacatttaccttacaccaaaatatttgtcatgtctcccacatctcgctggatagaacctcataggcaaaaaacttttgcggatacacaacttctcccgagatgaaatctcttggttctgggacgaaatccagctcaatttctccttgtacaggagatctcatccacggtagcgtcggctcgactgctctaggaagatttacacggtgaagagggaattccagctctcgttgggatcgacccgcgacaactaaccagtcgaggggggtgggggtggagaagaacaatccggagaagaaggtgtcagagatgcaggagaagaaggtgcagaggttctaatggactgtatgatccgctgctgatccatcacttttccggtgtacagtacgagttcttgtattctctcgtttcgtgtaaaataacagagcgagaaaagtggagacgtgacctttcgcttgtcccatatgtactcttgataagaacgattaggaaaatgggattgtcatgggcttgtcgtttaattgggcttctagcaaattgaaattgattatttcatttgggcttgttgacatatttcatgggcttctaaattataaaaacaaaatcccctaaattacaaaaattaaatcaaaattgataattcaaataaaaaaaagaagtccctaagttgaaaatgggaaaatttgaaaaattcgatttccatttctgtttgcaaaattgattgggttttctgagtgtcttctctcactaatccgatgaattcaagttcagtgtcagtgtcatctcgtattgacggagcccgtggttttccggtgaaatgtgcgtgtggagtagatgtgacgatcttcacagccaagagtcaagacaatccaggaagacccttttccggtgtaaaagcaaaagagatccggatatgtggacaaacaaaagagatgtaaatagagttggtgtttatattgtgtatttgtgtagtgtatacttgcttaacttgtcagatttggtttgtgggttgtgcaatagggtcatttgtttaagtaggttgaggatgctgtgtaagaagaggtcgaagatgctttagcaaaatttggaatcattgcaaatgagattaacaaagtcaaatctgaggcaaatgagctacatgcgatgttacaagaactgaaagaataagcaatattgaacaaaaaggaaatctgcaagttgaaagtgtgcttaaaagtgtgttttgtgtggctttgcatgatcaacattgccaatgtttacataatggttggtaaggcaaagaaaaaggaatttgtaatgttgtattagttgttgtctttactagcttataatgactttgtaatgtcgtatttgtgacttatatgccgtgtttttataatgcttttgttgttgttttaatgagtaactagacttttacccgcggtacatcgcgggactatatgtttttttacaaaaagaaaacatttaatttgtttagtagattaaaaatatatatgatttaatgttttttattttctaaatatacaaatcttatatctatatatttttaatgtaaaatttatatgtttgatttttactgtttaaaattttaggaacaataaacatacagttcattaagttaaaatctaaattataacaattataacaacaatttaaattttaaatttttttttgttaatactgtttcttttgtatagtgtttaagataatataattgtattttgattgttatatctaggatttcacccgtgatatactgtctcgtattactatcgaccaaacccgtcctaccatctaatctcgtttagtgaaattaaatatatctaatgaatttcacccgtggtataccatctcgtattactatcgacccaaaaccgtcctaccatctaaccccgttcagtgaaattaaacattattttattgtttttattttaataatatttttatttaaaagatatataattcaaatcaatttaaaagatatataatttaacagatattgtagggtagaaatatcggaaaatgtatgttgggagtaattagttgatgaaaaaatctcggattatagatatgtgaataaacccgtgtagaattttttggggagatttttggaaacgtttgttgagcgcaatataaaatatttaaattttcaaatctgaataactttttttttctttcaaatctgaataattaatatcaattagatatcttgagagatttttggcaactattattgaatataatatcttgaatttaattatcaacagaaaatatttaatgtcagtggcatgccattgtaaataagtgccaagtacaggatttatttgctaaaatggctgcaaaaatgtagatgtaaatgtagatgtaaatgtagatgttagtgtttgattgaaagcacgtgtaaaagaacaattaaactagttcaaattcaaattgttcaactgaatccccttaaatggttcaactaaacaagtaatcgatggttcaactgtttattttggtagcacaacgagttcaaatggttcccatggttcattcatcataaatatagtggttcatatggttcattgaacgctaaaaacataaacccgtgattttcccgccaaaaacgtaaacccgtgattttcccgcctaaaacgtaaacccgtgattttctggcagaaacgtaaacccgtaattttcccaccgaaaaacgtaaacccgtgattttcccgccaaaaacgttaacctgtaatttttccgccaaaaacgtaaacctgtaatttttccgccaaaaatataaatccgtaaaaagtggaatccgtaaatatcgtaagtttgatgataatgaattaataattattaataatgataattatttattattgttttataataataattaattaaattattacttaaatggattaacccatttaacaactcaacccatcaaattaaatgagttatgggttgacccaacctatttaacaaaatgagttgagtcaacccataactcatttaaccctaaactcatttgattatgagttgggttacccattttgagacccatatggttcatacataaatacttgtataataaaaacaaagtggttcacatgattcattcatcataaatatagtggttcacatggttcatacataaatacttgcataataaaaacaaagtggttcacaaaggtcatgcataattaaagtttttatttataaaaagtcttatcaatgaaactttaatagtaatagtagattgttgttgaactagtagtaaacttcaaatggttctacatattataaaatcataaaacacatttaaatatgattatagttgaactagatgaacctgttgtactaggcttgacgattccgagaaacacaaatttaaacacaaagacttgttcttagttgaacctgtcgtttgacaattccgagaaacattaatttaaacacaaagacttgttcgtagttgaacttcttgtactagttgacgagctaatctcaatcatcattggtaggaggctgcaaccacctctccaagttgatgacaggcgtagctttgttattagtcttctttcggcgcttctcacctgtggatggaaaccgggtttcttgattccttgctgtttttagagtgtaatccggcgtttttgcgatcttctccacatagtgagcctgatgcggcaccacatgtatcgttctgtaatatgctaatgcccacgtctcgatcaagtaatatttcgagcaaagaccatagatacttacattcaagatcgaacggttattccatcttagatcgctttatggttgcagctattgcatggacgcatgggtatttatctatatcaaaacatctgcaagaacaagttttcttttccaagtccacgaaataagagaaaccatcttttcgatttacgatgtattcttgtcggaagctgtttagttcagttgcacttaactttgcagcaattggacaacagatgtgtaatatattcttcacaacaggcatcacttgtcttgtgttcgatgtagatgcagaatctttctgatgtttgttgaaccactcagaaaacttctccaaaatcgcatcgatcattagtaaaagatggtacttccttatttcctgaaaacacagcgttcattgactcaacagagttgctagtatctatgtcgtacttgtctccctcggaatagcacctagcccatttctcaagcccaattgacttatcgagatagttaggtactttaggatactttctcataaaatctccatacttaatgatgaactcagcctgattataaatatgagcacattccctaaatttttcaatacctacatccttgtcacatgtcaaccatttcttaatgttttgagacaaatgtcatatacaatgttcatgtgatgcctttgggaacacatcccagactctcttgatgatgtttttatgtctgtcgcttatgaaaaccaattccaggtcatccgcgataatggtatttaacattctaaaaaaccagttccaactagcatgattctcactatcaattacaccaggagtaatgatgatgattaggatcctgagttgttgcaataactaacatctctccacatatagttttcagaaaagttgcatcgatcactataactttcctcattgccttaaacccttcaatgcttgcgcccaaagcgatgaattggtacttaaacatgtgttcttcatccaattccacttccgttattgtcccatgattcacataccttaaaatgtgaagataagcaaacaacaacttgtagctagtttcagggttcccacgaacatcactaacatgttttttttgcccccttaaagctgcggagtaggaaaaatccaaaccaagtcttcctttaataatactcattctttgtttaggtcatagtgtgtcaaaattaccaagatagtcaccatgcaaaatatctgctactaatcagaatgtgcctttttgtttatcatatccactagcctccggacaccgagagcatgtatgtatatttttgtgtaccttcacactccaaaaatctgagctcttagtttttgtaattcttaaataccagtcacaacccaatgatgcgagagcgcgtcacatatgccactatgggggaaaaacgaatctggagtgccatcttataatctgagtgccactataaatgtgatattccaaaattacctttaatgaaattacaactggtataaataagagattatagaataacaggtacaaatgatataactaaatgataatataatacaattggtacaaaatggtataattgtatgtaaatagaaacaatcggtacaaatggtattattgaaaaaatagtacaacagatacaaataatataagtgagatataaatatgaacaactggtacaaaatgtattaatagtacagttgatacaactcagttatacgggaaaaatggtacaaaatggtagaagttaagctatttgtatttctaaacccgatatctagggttcgttgagaagaaagaagtaatctagggtttcgttagattgcagaaaaagaagaagagatcgaagaaagagaagagaaatccatgaaaaagaagaagatagatagatccatggagaagaagaagaaagatttctagaaaattgattttgatagagaatagacaaaatctaaaagaataaaaaagaagaagtggaaagagaaaaaaaaaagaggcagtattttattttaagttggcaaaggaaggagtgacagggatacgtaatatatggattatgttaaggatttttggatttttcatataaattttgatttaaaataaaactaaaattaaaatgaaaaacgtgggagggtatgagtgaacatatttattgagttagtggcattagtgataaaattcccaatgatgcttgactgcattctaacataagacggcccgtgtcagatttaatagttttcacatcaaacaatccctcctttgcagctctattaatcaaatcccatattgcttcaataaaacgaaattcttgatcttttcaaacaccaatatcatcttcccattctttgacaacgacagcttcactttcttgtaccggacgtgcaagctcaacatattcttccctaacatcactatcagaatcttcattaacaccattctctagcatcggcggttcaataacagtttcagtaactccattctctagcatcagcggttaagtaactccattctctagcatcagcggttcagtaactccattctctagcattagcggttcgataataggttcactagctgtctcatgttgttcctctggttcaataataggttcataaacactcagatttcctataattcacaccgcataaacttcttcgctctactattggaacttgcctattattactttcaaaatcactgcataactctacatgcaaaactggtctaagcccctctttattcaataacgttaaatatatcaacacatcctcatcatctacaatataagactctcttcgtgctttagatatcatgtaactcaatttcagcttccgtttctctccatctagagcaatctttttacagatcttatctactaaatccgcatatgttattctctccaaaaatgatgtcttaaatactatgccgtatattgaatttttgcaactccactcatggtctgttgaatagtaccctccatagtcaaaatgtatgttcgtctagatcttcttcttcatcgcctcctataaatataaacaatatattatgaattgtatcagtcaaaccacgatttgtaccagttgtctgattcaatttcagatcgtccattcattttattctgcaactattgattgattccggggagtaacacaattcaattctgataagtgtgtattttgcatgttttgagcatccatttgtcatcactttagcatcatatcatcactgttttataccatttctcatcatttgtcatcactttacatgtttacgataggtttgcatgcatgttgcatatttgtgttgatttcaggtgatttggagctgttgacgagctaactggaagaagcggacctgatcatgacaaaccactcgacccaaaggtcgagtaggagcttcaagatctcaagagatcactcgacccccaggtcgagtagatggcatcaccacttcacctcaccactcgaccacgaggtcgagcgtcttcatctccatcacctgaccatcactcgatcacatcagtcgaccctgaggtcgagtgtcttcaccaccattacctgatcatcactcaaccatatcactctacctggaagtcgagtatcaccttcaccaccactcgactgcaccctcgatagcaagcttcagagtcttcttcattccgcactcaaccagacactcgagcacaaggaagaaaagaagactccagctattcactcgacctcccactcgaccacctgggtcgagtacagttcttaatccgtcccaatacttcgtcgttttaagtattagggtttcggaatatttggctataagtagcatgtacttcacattttcgcaaacaagtttttatctagttttatttcgcagaccttgtgttctaaaccttttgtaatctggatttctctatatctattcagtattcagtattcagtttctgttcttgatttcgtttactgttgttcattctgttatcatcatgctgttacactgctgttatcacgttttcaacttgttcaacgcttatgctttctgttatgatgtctgagtagtgaataggtttctgaggatgggttagagtagtgtaggattcttagtatgctaggtgattgagtattgattgatagatcccttctggattagttgttcttaatgcatattgctttctgatcaactggaatttgagcccagacatttccgcgcccaaaaggtgttcgatgaaatgtctgaaccactaattccagagattcgtgaccctgtaccaaggtattggctgcaggaagcgttttggctttaacttgttgattcgtaatgcctgttaggttagctctagtcaatggtgattgactctgggactaggttaacttgagagtgtctgttgcggtggcacttagatttggttaatgaacttgttgtctagggttaatttattgagcatgtcaatcacctgtaaactgaggaaacgaaactactcaattaccccatcctcgggaattttttatctgattgaactctttgtttactctactgttgtttactgcatcttgttatctatcgcttaatttctgcagttctttcttgttactcgacctcatactcgaccaccaagttgtctggcaacagactgtgcagtcgagtatctgtgttttattttctgtctgtttactcgacctgtcactcgacctcacctagtgctctgcaaagagctgtgttggtcgagtgttttactgtttctacttgaatttctgttttctgcatgttcacttaggattgctagaacataccacaacctgttattgcttggcttgacttagtgacattctgatcacatcttgattgttagcatcacacccatttgtattgacaacctaaaatattacaacgacatgattggtgttttaggataattgactaaaaacctattatcaatttggaaagggaaccaaacccagatttgacagagaggagcttaaggacttgtgggccactattggaaacaatctaccgctaaactcgacgctgtccaagagcaaccaaatccggagtcctgtgatccgcttctttcagagatcggttgccaacgtcttttactccagggagtctacaggcaccgtgtctaacacggacatggagatgatagattatgcgcttacagggattctccgccggacgaagggaaagaatgtcttgagaggcgatctcaacaacacaccaccagtaatgcctctgatgatccatctgtgtggatataggaagtgggcgttgacgaacggaaagaagaaggtgagaggagcactatgcgtgggtggcgttgtgacgccaattctgcaagcttgtggagtaccgctcaaggaaccagggttagcactgaggatgatggacttggatcatttgcgccgatgtgagttcttggagtttgacatggctggcgactttcaccgctacaggtttgagcattcatcgattagaatcgccaacattctcctcccctgcattgacgctattaggattctcgagggcaggaacattgacttcaagcctgcgcttgaagatctttatttcgagggcagtccgccaactgaggagatcagtcacaccgaaggagctacaatagaagatgttgatgagacagatgatatagatgaggtggagtttgacacgagcatgtatcatttcagtgagcacatacctccagcgagggaaagcaagagtttgagcaaagctcacaggaacaacagcaagctgcagaagtggtgcaagaaacatgataagttactcgctaagtgcctcagggctatcaagtttctgaaggacaagatcagctgctcctcttccactacagctattccgcagggacagctccctcaggagattccttcgaggagatatgacgcgcccgagccaagtcagcgcaggcctgagcctagagagcaggagattccgcatgtccctgcgaagcattcatcattcgagcctcgtgaatttgggaggaagaggaggacaacactcactcgatctagcagcaggagcagacgacttctgcagtctcgtagtttacgcgaccgcggtgctggccgcagcagaaggagagaggtcgagtatcctcagagcggtgctggccgccagagagctgatgaggtcgagtacccacctgctggagctgatacagaacaaggcggctcgtctatagcctaggagcaatcacaggcggccattgacgagcaactacgttcattcttcgactgaggtaagcgcctcacttcaccattgtattatatcatccgttgtgatttgtttcttcattttgtttctgtgattggatttgtcctgagtactctcttccaagtttattcgcacagtggactgtgtgatttaagtttgggagagggctcaggaagtgtgtgttgcattgtgtatatttttgagtctgcattcatctaaggcatagaaaaaccaaaaaaatttgaaaaatttcagaaaatgatttcaaaaaaagaaaaacaagagtgttcatttagttgcattacatttaggatcgagtctagagtgtttcatttaggattgttgcatatgcataggggataatgatgagatagccttgtaagcattttggttcaccggctaactcagtgccctcgttgctagttgtctgttgcgtagtcaatgaatttgaaataaaactgaaccatgcctagattgctctactcgaccacactgtcatgatctgataccattccctatcaatttgaacctgaatctgatctctaattatcatgtctgcatcaaatttgaactcatggataccctaaaatacttggattttcttattcattttgatctctcttgttaatccaagtagctgactctccttattagagcagttaacccaaacccaaacctagactttctttcaagccctatatcacttgtgagtgtttgtgaggttttattccgattaagcctggtagaaagtgttaggttcgtaacgacagagatagtgtctcatgtagttctagttcgcattttttggactagataggattaggtgggcgcttatactttcggttgggatgtgtttaaaagaaaaacaaaggggttgattcattgataagaaaaggtaaaagactctaggtgaagtaagctaaagaagcagaaaaagtctagtaaaggttttgggatttgtaaagaaaagaaagagttcttgttagctattgaagatgggcaaaagcccttggttttagaatgttaaaaaacaggaaccttagttgttaaagaaatccaaatccgctagatgtatcaaagtgttgagaaagcttctcctagagttaagagaaaagaaaagaatgattagaaaaagggcttaaaagattcatgaatgcaaagggtagagttaagttcttatattgggattggagatggggttaccattagagcttcgtttgatatactctgggtaggtgggatctaatctctgtatgcatagcttgggacttacctttagcattctactaaagcttaatcattttttgagagatcccctgttactgaagcctattctgtaagggaccatctttgtctcttgaccttttaccttagccaaatgagttcattgatgatgcattgcttgattcacgttccagaactaaggaatgttaaagggattggtagatttgaaaacttgtgtaggtcgagcatatgagtcggattgattgataatgaggcatgactaacgtttttaagtagaattcgatcttgcagcttagaactttcaacttggaaattgatttcatctagtttatctggtgctttagctctgagtccccgctttcaaacctcacctctagcttgttcttgattgtttgcttgagggcaagcaaagactaagtttcggggagttgataagtgtgtattttgcatattttgagcatccatttgtcatcactttagcatcatatcatcactgttttataccatttctcatcatttgtcatcactttacatgtttaggataggtttgcatacatgttgcatatttgtattgatttcaggtgatttagagctgttgacgagctaactagaagaagcggacctgatcatgacaaaccactcgaccccaggtcgagtagatggcatcaccacttcacctcaccactcgaccacgaggtcgagcgtcctcatctccatcacctgaccattactcgatcacatcactcgaccctgaggtcgagtgtcttcaccaccattacctgatcatcactcgaccatatcactctacctggaagtcgagtatcaccttcaccaccactcgattacaccctcgatggcaagcttcagagtctatttcattccgcactcaaccagacactcgagcacaaggaagaaaagaagactccagctatttactcgacctcccactcgaccacctgggtcgagtacagttcttaatccgtcccaataaagtattagggtttcagaatatttggctataagtagcatgtacttcatattttcgcaaacaagtttttatctagttttattccgcagaccttgtgttctagaccttttgtaatccggatttctctttatctattcagtattcagtattcagtttctgttcttgatttcgttactgttgttcattctgttatcatcatgctgttacactgctgttatcatgttttcaacttgttcaacgtttatgctttctgttatgatgtctgagtagtgaataggtttctgaggatgggttagagtagtgtaggattctcagtatgctaggtgattgagtattgattgatagatcccttctggattagttgttcttaatgcctattgctttctgatcaactggaatttgagtccagacatttctgcgcccaaaaggtgttcgatgaaatgtctgaaccactaattccagagattcgtgaccctgtaccaaggtattggttgcagggagcatcttggctttaacttgtttattcgtaatgcctgttaggttagctctcgtcaatggtgattgactctgggactaggttaacttgagagtctctgttgcggtggcacttagattttgttaatgaacttgttgtctaaggttaatttattgagtatgtcaatcacctgtaaactgaggaaacgaaactactcaattaccccatcctcgggaattctttatctgattgaactctttgtttactctactgttgtttactgcatcttgttatctgtcgcttaatttctgcagttctttcttgttactcgacctcatactcgaccacccagttgtctggcaacagactgtgcagtcgagtatctgtgttttattttctgtctgtttactcgacctgtcactcgacctcacccagtactctgcaaagagctgtgttggtcgagtgttttactgtttctgcttgaatttctgttttctgcatgttcacttaggactgctagaacacaccacaacctgttattgcttggcttgacttagtgacttctgatcacatcttgattgttagcatcacacctatttggattgacaacctaaaatactacaacgacatgattggtgttttaggataattaactaaaaacctattatcaaattcaattacattgtactaactaccattgcaaatagaatacctaccggagatggtatccctaaaggaggacgtttccagagtggacgagcaaatatcgatcaagaatttgatccaacactatcgaggaggaagacacatgcagcaccggagaaatcgacggtcgacgaattggatggagatcaaaaagtggcatgccggattcaaatttccggttcagtgaaatttcgggtatttgggtataaaatacccgaacccgaaggatacccgattttttcgggtatttaatggttctgaaattctaaatccgaaccgacccaaacttgattgaaatcgaatcgaacccgaaccgaagttttctatttaccctattgggtcatagaatagtatacccgatatattcgtacctgaccggatattacccgaacttgacccgcatacccgaatgtccagccctagctagtaaataaccgtaaatattctaacaaaaagatatgacaaaaagacacgactataaaataaaaaaaaacgtaaatattttaacgaaaagttgcaaaaaacaataccgttaaaaagtgcaaaagctatttattgagattgttattgttattagattccaaaaaaaactttggttagatcaagaattagagaaaaaaaattatattaaaatgatgtatgtttagaaatagtttagagagtaaagaatttggagccattttacaaattaaatattttggatttaacatgaaataaataatttgtgtgaaagaacaaattatggaacctatttaggaagaaggaaacatataaagagttgaaaagtcacaaacatttttttatttttttatttttatttttttttataaaaagaaaaagttgtaaaaaatacaaagaaatattaaagagatgtaactttaaatgaatatatgcaactataaaaacataatcacaaattggaaagatattactgtaattgaacaaatatatatgtgaaaaaaccataaatgtgttaatgaaaagatgcaataaaaatatacaacctaaataaaaaagatatgactgtagttaacgaatataactgtaaaaaaaagaataatcgtaaatattttaaagaaaaatgtgataaaaatacacaagcataaatcattaacttataatttatacagcttgctctttttgtttttctatttttgtttagctaatcctttcatctacaaatatgtagaaaaagaaagaaactatatacactcctcaacttgcagccttgcaggagctaagattcttaattaatgatacttttagagaacttgcttgagaacatgctagttaatgacaactccaaaaaacaaagataatgcttgtttatatgacctaaatttcacaataagacatattttgtcgcactatcttagaggaaaaaaacaaacatacaatgcacgtttcttataatatagaatctcaatacatacatataactttgttgcgtatggatagaaaatcagtcacgtatatttcatgtgtggctgataacaaagctacattaattttttccaccaatactatttttcttacaatagaaatcaattattttttatttggaccaaaacgttttgtcaatgtgtatttgattttttattttataattattgattaagaagtcggctagaaagaacaataatataaatatagagatgattcgttgtatgggtatattagtttttttgggtgaattaaatttatatatttagaagaagtggaaattaacaaagtaggagagataatttaaaaattaggtaagtatgaaagagaaaaaaaatataaactaaaagtatcttttatatttgaattaattacaaaattgctatagttacaatatagttattatacggatatatatgtgaagacgataacattattattaaaaggtaacaaaatatttagcatgaaaagcaaaaaagttgacttacgactcaataatcatgtaaaaaaatacatgcttcagaatagttagcagataacgtattatcaggataacatgataacaaatatctcggtaatacttattaggttaatatgataacaaaatatttatatcaataagtttataattatatcatactaagttattttgtattgcgataagttataatttatgtgatatatttatatttaccgtctaaactcatttattatatcatataaaaaaaattaacgagttactataacgtgcaaatatgaatttcatccaataaaattaatattatcattacctttagataaagttttatttaactcggtaatttgattgttaacaaatttgagatgaaagataaaagataaaaggatatagggataatgatgtaattttctttgctaatgtactgtgtaaatagtgacacatttgtgtcagttaattttctgctcttctatgtatacttcttataaataccctagtttttattggtaactgtgtattgctgtagtataaaatatatacaacactacttttgaaatcattcgcgaaaatgatacttaaagtggtctttttaattattttttgttataatttaccattattttgtattagttttctaactattttaaaatttatatgttattttctgttagaaagatatgtactgcttggtatcatcaatttaattaagtagttttgattgctaacacgagaatgtaaaaaattaacgtttttagctgataaaaagggttatcactatataaaaatggtataaaatagatatagaaagagcaatacaaaaaagttaagtagactttttgtatttttttgagagtagttacaatgaaaacgttacatcttatattgtaacgctaatttaattggtaactttgtacagttacaatattagacatatcaatgtgctgtaatatatatatatatatatatatatatatatataattaaaaaaaattgtaccaaaagcaataccaaaaagaaaatgttaggaaaaataacgttacaaaagtagcagagcgaaagagcgttacaaaaaaaatcaagagtatatttttatatcattttagtatttatttgtgattgattacaactaatgtggtatacccttaccgttgtggtatatagttactactcacaactattcttagtttcttatatcgctattttgtaccgctatttcataaccgctatatcttaccttttttctactatttttatatcgtttttacaatgtttccaactattttcctatcgttttctatcgtattatcaatccatttaaatatattctaattaatatgtaataaaataaataaaaagaagaaaaagtgttaagaattaagaatctgaaataaactagaagaagttggatatatattccatctttaagacagtgagggtcctcttttgcgtgactgtcaaatctcattcttctctttcttctctctctccaagagaaagaaaatctgagtttccgagaaaataaaatctcaagagttaaaaagaaagaaacttttgtcgaagagattccaatcggtgatctttgtctttcttttctctagaaaatctctgttgctctctatatatccatatagatgctctaagactatagttgttgttgcaggtatcgtaattttctatctctttttatttcactactatattcttctttgctttttattttttgtgatttatgagtattttagcttttctcttctaattaataaactcagtttttatatttgttgatctgttctaagtgatgacaaaaaaaaaagatctgttctaagtcttttgtttgttttgtttctcttcttactttcattgatgttgatattttttttaagttggtcattcttaacaaaatcttgaaaagagttacaaatgaatgtatgtatattgattgtaaaataatgtatttgttgtttcagtttcagattagaaacttttagttttatcaaaaaaaaaatttatttttatttttaaacctttcaaagataaactttttttaaaaaagaatggaaatgggttgattccttttgacactcatatataactccatctaaaaagcttaggttgattttgcttttccatttatgaactgaaatttttattagttttttcttcaagagaaagaattatcataaatttcatgatttacgacctaaaaaacaagaatttgtggttaaataactataatatttgataaaatctaaaaatcaattaaattgaataactctagtatgtagtatgtacgaatgtaaggtgttttgaaagaataataccatacccttgattcaataccaaatatatttcaattaatttcttaactatctaatcagataacactatacatatgttgtaactctacatatgcaattaaaaaattcgtgtaataatattagaatagtttaaagcttgataactaacatcagccataagaaaagctcatgactaaattataatttggaaatgtctatatgtattataaataaattttaattaaatgattgttctgaaaatcaaaatgtattaattaaatggtagttatgtttttcatggtttgatgggttgtgaatagtaatgaagtttgtctgaggcaagtagcagaacccacaaatgtctcatcctctctgcgcatttactgctaactttgggtcatcagattcttcttttggtcccaaaaataaaatcacagatcctttttgctacctttttttttcctatagtcccaaatggtccaccatttctataaattttaaaaataaaatctcatttcatatggtttaaattttttatagattaaatttcacagacaaaatgtcaataatattcttgaatataagagttttgtttttggtataagctttttatatatatgttacaaaagccaagaaaagttgctctttgtggaaatagtctaatgtgttatttttgtctgcacatgacaatcatacatcatttaaacaaccatccaaagtaataaaagattcacatgatttatacatatttctttgaaaaacttgtttataaatttcacatttaatataaacaaaaaagatcacatgattttattttgcatcatcaaaatataattctcttcttaaagaaaaaaaaagtcataaccgtacccttaaattgtgttttgtttcattggtagataataatggagggagacacaatatctaggatgatgggaagtggagttcaaatggatgggaagattcttcaaacgtttgagaaaagttttgttcaagtgcaaaacatattggaccacaacagattgcttataaacgagataaaccaaaaccatgagtccaaaatcccggacaacctcggacgaaacgtcggtttgatccgagaattgaacaataacgtgagaagggttgctcatctttatgtcgatctttccaacaacttctccaaatccatggaagcttcttctgaaggagactcatcagaaggacgaggtaacagaagaatcaggcctgcttaattaagaatcagggttgtttcttcaaaattagcttcgaaattagcttttaatgtgggctaatctcctttctcaagtgattggcgataaatgttttaaagcagaaatggtgattgtaattgaaaaatatgttcaatactattatttgaaaagtatgtttagtgaggtcgacacaaagttggaagaaataacaagtttgccattggattacaaaaattatttcatgaaaaacctgtttcaaaaccgctgatttttttgacccggattttaaaagtcggattgtcgcgtctaatcttagtcatccattataattaatagtagccgttgatttaaccataaaaatcaaatcctacagcaagactttttaggagaaaatcttcatttatttctaattaatttattctcttattcaatactattaataattatacttctataggggtaattggttaggctgtatctttatggtacaactccaaaaaaacttaaaaccaaaattttgaaccaatcaagctttaactttcttaagaaatctcatagcccaaaatatcataagaatttataatatttattatattctaaaagattactaatctaatcagatatttttaaaacatttcctaatcaaatctaacaaatctactttatttttatacatataacattataaatattcaattaatatgtttgaattcaaaattagcttaaatattttaaatttatttaaataactataaaaacttataattaaaatatcttttatgtttgatgtttaaacatttaaaaataattaattaaatttttgttttgatattaatttcacttaattaaattaatgaatttaaattttgatagcagcgatttattttaatatcaattttgatagcatcgattaatttacggtttgaattatcaaacatgatttttttccagcaaccaaatcgtattagttttaaaatatttaatgcgtatattcctttataaattcaaatatatcacttctccataattataggtaatcaattatttagtttgatattcatttttgaataataataaattttttaacaattaacataattaaataactacgtatacggtaatagctaaatattcttttataattatggaatttatcataatcactaaacttgaattcgacgatttaatattttgtgcatatatttttacttaacagttcttatcttcttttaccctctcgtctcttttttttttattctagcagaagagaacgagacgatggagaaaaccgagattgtgggattgacgagaccatggagaaagcaatacatcgagttatcgtcactctctctctctctctctctctctctctctctctctctctctctctctctctctctctctctctctctctctctctctctctctctctctctctctctctttttccctaatttctttttagtatttcatttacaaatatttgttttgatttacaatcatattttaggtatattagttatgcaaatcgtttagtttcgctttgattataagcttaaactggggcgattatcacgttatttgtatcatcgtttcttccgaaagatttactatgtgattacggtggaatccttataacatagtattctggggcaattaacaaatcttttctctagttgagtgagtgaattttaaaacaatttcaaaatctatttgtattctgaatgagtaattctgattgaattttgatcttggattttgtctttctcctttcaatttgcagcaatccggtgaggaccaaaaggtgagccaagtcgtatacatgtcggtaggtttgagaatggaaggtttgaatctttaactcatttatttttgcaggaacccattgtttatgttgatctttaaaatccttatgattttttaaatttgcaggttaggatttgattagacttgctagacatatggatttgtttagtatgatcatggcaatagactagagaatgttggaagttcctttgttttaaaacctcttccacaggttaggcctttgtgttttgcttgagggcaagcaaaacgaaaatatttttactgtttttagttatgttttagatacaggttttggagtctttttgttatttctagagttcttttagagtcttttcaggtattctatggagagagacaagaatggcgataatgagaaattttggagcaaaagctgaagaaaataagccgaaggacgaattcactttcatatcaagtcaagagtgtcgatcgacacactctaggtgtcgattggcaccagttgcggcccagaaaggtccatgatggtttagagtttgaagatatggatatttatcccagaagacttttctattttcattattagtctttgcatgtctttaggtcatatatatacatatatagttttaaagtcattgtttagaccaaacaagtctttttcttagcctcttgagaagcaacttgttctagagcactttcataagctattcatccctattttcagagtttcattagagatttccataacagtgaagagattttttctaactctctctttttttattttgtttatgctttcttattcatacatgttgtttgtgtcaaccgtcaggtctgagtagtctgcttgttagggttagggttaggttttctcgttagggattcatatgatttagtagatcgcccccttgccaggttatctgtaggattcttcatctttagttgttcttaatgctagttctagagtacctaactagaacttgatctcagataataggtatacccaccataggtacctgttaccagaattactatttgatgagccgacgtttataggtatccagtaagaatcggcctatctacttaggtgaacttatcaaattcgtttagaatgcatgtttaggtataagatttcacggcacaccactggaaatctttaattctagacatagtagcacggcacaccaccgattattcaataattagggtttgagttcgagaactgttcgataacaacctagctatttctagatcttctaatcatttagttcctgagaataccgtaaacctaacgttttattatcttgttttacaacaaaccaaactgctatttgcttagttactttctttttatttccttatactcatttagcttaatcttgatactttagcttattgtgtgaacaaaagaactttgtggaattcgacccttaagcaattgaagctgcttcttggttgaagcaattgaagcctggttcactcaccacctggagaagcatcaagatagccttcttgaaccacttctatgatgatgctaagttagacaagctgtgaaaaaaagatgtataccttcactcaaggtgtgacagaagctttcaaggcagcctgggtttatttcaaggaatatcaacgggactgccagcatcatggcttcagtgaggtacaacttctaggtaccttcttcaaaggagttgattggagatatcagatggctcttgatttaatgagcaatggtaacttcaataccaagtatctggtagatgctacagctttgattgagaaccttgcctgtagcaacagtaccaagaatgttgacttcgagaggaagaagattgcaagagttgtttcaaggaatcagatggctgaggtacatgctaagctagattcagttcacaacttgcttatagggaagaagcatgtacactttgctgctaaagaagagaccattgagcttgagccagagacagaagaaggagtcttctacattgatggttgatatgagtcaaattaccctaatgactactctctcaaataaagaggttgttatagcacttaaaggtcgaattccacaaagttctcggatcacacaatagactaacaatttcgaataaagctaaacagaaaatatataaaagttaaagacaagaaagcaatgaaagagattggttgtagattcagatgattaaaacgtcggggttagggaaattctcaggaaatatcagaatagtagatctagcagtaaattaggaatattatcgaaccattctagaactcaaatcactaatatagagtaatcggtggcgttccgtgctactcactatgcttaataatattgatctcagctctcttgtaaatccctagaactaagcaagcattataatcaggtttgataagttcacctaagtaatcgacgctagctcgcatctaaatactaggctcatctaagatagttccagtaatagatacctacgtcgggtatacctattatcctaaaatcaagttctagttacttactctagaactagcattaagaacaatcaaagataaagaattctaaatatattatcctaacagggtttttgatctactaattcatccaaatccctagtgagaatccctaaaccgaacaagagaactactcaagcatgatcatagaagaacaaaacatgattgaataagaaatcaatgatgaaattatgaagaacaaagagtttagaagaatcttctctaaagggagtctccacatggttttgctccaaagtacagaatagataaataagtgttaggtctaaacaatgacctttaaaactatatatatgacctaaaaacgtgatggaccttatttagaaataaggaaaagttctgggccgaatttggaaatcttcaaaacttcaataagttgcgcacttgtattgccgtcaggtattggtgtcgctcgatactagggtttgtgtcgatcgacacctacgtcaatttttgtctccgaattgcttatgtagcttaagttgtctgtttttctccataatgctccataatctccaaatgcatcccaaacatgtaatgacctggaaaagactagaaaaggctctacaaataacaaaatgactctaaaaactatacctaaatcatacctaaaagtagtgaaaatcgggttatatcaatggtcaaggttacaggaagtttggacagccacatggtaactttagtggcaacaggtttacagagaaccagagttctttaggtttcaccccaaaacctgccttccagaagtcctatcctcagagcaactttactaggacttatggtaattcttcttaccaaatccctcctccaccctctactgagagtaagatggaatccatgcttgaacagattctagagggacagtccaagttggttgtgggcttcaatggaaagtttaacgctatctacacagatcttaatgggaagatcgacaatctgagctctcacatgaagaagctagatgttcaggtggctcaaactactcagtctatcaagagacaagagggtttccttcctggcacccctgatactaatccaaggaagagctgtaacgcgatcatggtcagatctgaagaagaaagcatgaaaagggttgtgttggagctcgctgttgtagagttggtgtcgaccgacacacatcagtgtcgatcaacacaaggcaatccgatctgggacgaatcaaatgacaagacaatgtcaaacaggaacagaaaggatcgttcatcactcgacggtgtcgaccgacactcatctagtgtggatcgaacttaaaaacccttctggattcgcttggcccctacgcggttttcgctggctaatgtggagattcgatcataccaacgtccaaataacgttcaaatggatgtctgatctacaaattccagagatttgtgactcgaccaagatattggcttgtctgcttattggctttggtagattgtttcttaaaccttgctctgctatgtttcatcaacgacagttgagattaggaagtagtagagttatgagggtctctgtcacgacagtggattgacccggtttttgaatctatcgtcaagggtatttacctttcacgtattagccatctgatgaaccctagagttgcccttatcaatgaatccatccttaggacttctattagatttatttgtatcccctgttgattgcacttttatttacatgttatttgtatcccctatttgtatctcttgttgattgcattttagttttgtttgttggttctactcgacctaatgatcgagtagggcttttaagttctcatttttacttgtttgaatcctgacctaggattgttactagaaactcaccttcattataatctggcttgacttagttgtttctgtacacgtcttgattgctagcaataacagtggactggattgacaccccctatagctgcatcgacatgttagtgtttgtaggggaattgaactgaacctcacacccttcagcatataagtaggcataagtcctctacccctccatcgaagcgctgaattccaccaagtcaagctattgactctaaacaagcgcttagtgggaggcaacccactggtatgatttttctttttcttttccttttgatttattttttccgctctcttcggatttgaatgccactgaggaaagtgacgtttaagtctggggaggcacttactaattatgctttatagttattgagtcatattcttttattcaaaaataaaataaaaaacgtctttgtttagtacagttaggaatcatgatgtagacttctttggactattgcctggttgatgaatgctgcatgttcgacttaatgcgactattggaaaatccatatggcaaaccaacagacttgaggatatcctggtttccaacacaatccattaaggctggagctaatctcaatgcttttccttttacctcatcaaaaccgttagtgtttatagaacttgactccttgttcataactgatattgagaccaatgtgaaaaagaaaagtattcctctccccttataaataaaaaacaagagagtgatgcgattttcggtaatgtatagggataggattgtttcccatgaccccattattatacattattaggaatgatcaattacaaaggttggaaatatgtcgaggatgtcaatccagtaatgcgagtactcttttgtttactcttcaaaaagaataagtctggagagagaaagaataccaaaaataataaatagagaatggtcgatttatcatgatatagtacatgactaagtctagaaggttcttgaatattagcttgcttgatgggacccagcgataaaagcctagtggatatagttgtggaatctagaatgttgtgtacgcatgcagagaagtacatgttggttaggatttgattagacttgttaggcatatgtatttgtttagtatgatcatggcaatagactagagaatattgggagttcctttgtttttaaaacctcttccacgggttcggcctttgtgttttgtttgagggcaagcaaaagctaagtttggatgagttgatataaccctatttttactttttagctatgttttagatataggtttttgagtgtttttgttatttctagagtcatttcaggtattctatggagagagagacaagaatggagataaggagacattttggagcaaaagctgaagaaaataagctaaaggacaaattcactttcagatcaagtcgagagtgtcgaccgacacactcttggtgttgatcgacaccggtttcatcccagagaagtccatgacgctttcaagtctacagaagtggaaatataccccagaagacttccctatttgcattattagtccttgaacgttttttaggtcatatatatagttttagaggtcattgtttagacccaagaagttctttctatcaagttctttcaagcttttcatcccagttttctcttagagacaagctatttatcgcctgtttttcagagattcattcagatttcaatatagtgaagagatcttttctaactctttcttttactgaattgtttatgctttcttactcaaatatgttgcttgtttcaatctccatgtctgagtagtttgcttgttagggttagggtttctcactagggattcatatggtttagtacatcgcccctttgctaggtgatctatagaattcttcatctttaatttttcttgatgctagttctagagtaattaactagaacttgaatcctgacaatagatatacccgccataagtatatgtagttgaatctattatttgatgagcctggtctataggtgtgtaataagaatcggcttatttactaaggtgaactgaattgaactcgtttatattgcatgctgaagtataatatttttcggcttctctagtaatcttagctataggcatagagagttttgcggaacgccaccgattattctaaaattagagtttgagtttaagaattgtccgataataacctagctatcattagatctactaaccaatagtttcctgagaataccctaaacctgactctttattatcttgtttcacaaccaatcaatctgctgtttatttactttgttttcttttatattctcatattcccttctaccttaatcttaacacttaattcattgtgtgaacaaaaggactttgtggaaatccgacccttaaatactacaactgatctcttatttgagagagtgggtttacggcaatttgaatcgtatcaacattggatgggaagcaccaaatgtaggttccgaaaccccaaagatttcgacagcgcaagatgatgaggcagttatagctgaggttgaagtactagagactatgtttaacaaaggcgatgacgaagtacctagtagtggtggtgagaggaaaagtagaactagtggcagtagtggagactatgaagatatattagtggatagtgaggaagaggtcgaggatggagaaagtgtagaggaagttgctccgaaaggatatgatacaaagttttggggtcactttttagatgatgagttagcttgttctaatgcacctgagataatgtatagtccaagggaatttagttctcaagaagatggtaaaagcacttagattaatgcttctaagactgactcaggagccatgcctaatggaggatagagagaaagagagtcaagaagacttgatgatattgatgatgaggagtttgatataccgccgctgtttgatgatactgaatatgaaagggacgaaatccctgatttggatattgaagatgatgaaaaagggatctataagggaaaggtatatgcaagtaaacaagattgccaagcttagctattcatgcaaacagttcaatgatatttattcgcagataagcatgaagaacaatgagtgtgctggatatcttgagaggatgaaaacagagcattggacaagggtctatttccaaggtgaacgatataatcttatgacaagcaacatttcagaaactctgaacaatgccttaagaaaagggtgaggatccccatattggaattgttgaagttcatacgggctatgttaacaagatggtttagtgcaagaagaaagaagtttgcaaactgatatataggtcaaattgccttaagaccactctctcaaataagagatcgattgtagcacttaagggtcgaattccacaaagctctcggatcacacaatagaccaaggttttgaattaagctaagtaagatagtaatgaaaataaaaagaaacaaaaggaagcaatagcagattgtaaggttgtaagacaagaaagtaacgtcaggcttagggtattctcaggaaactattggttagtagatctaataatagctaggttgttatcgagccattcttaaactcaaactctaattatggaataaccggtggtgttccgcgaaactccctatgcttatagttaagaataaccggagatgccaaaagatctttaacctaaacatgcattctaaatgagttcaattgttcaccttagtagataggccgattcttattgcacacctataaaccatgctcatcaaataatagatccaactacagatacctatggtgggtatatctattgtctggattcaagttctaggtgatcaatctatatctagcattaagaacaattaaagatgaaaaattctacagataacctagcagggggcgatctattaaaccatatgaatccctaatgagaaaccctaaacctaacaagtggattactcagacatgatcaaagaaacacaaatcatagtctcaataagaaatcaataatagcaagagaaagagtaaagaagatcttctctaaagggagtctccacagggttttgctcccaaagtacaaaagagatgaggagaatagcctctccaagcttaggtctaaacaatgacctttaaaactatatatatatatatgacctaaaaacgtgatggaccttctttagaaataagagaaagttctggacggaatttggaaatcttcaaaacatcaataagttgcgtctttgaattgtcgtcaggtattggtgtcgctcgacaccaggggtggtgtcgttcgacacctacgcggattttagtctgcaaaaactgcttctgcaacttaagttgtctgttttgctccagagaatgctccataatctccaaatgcattccaaacatgtaaagacttgaaaagactgtagaaataacaaaaggactctaaaacctatacctaaatcatagctaaaagcagtaaaaatagggttatatcacaaagcatacatgtgtagttactccaaaagtagataaagtgttgacgaaaaaccttgcaaaagtcagaggaagcaaagttggaaaagttaacacttggagttatgaaattgtggggctgttcaaggggaagcatcaggtctttcttgaccgtaaacaatgtacttgcaaggagtacaataatttaaaaattatatgtggacatgctatgttggtagctactagtgttggtcagtcatatgaatccttaatagtagacttttacaagacaacaacttggaaagcaacttacaaggatgtaataaatcctgaactcaacttggaagacgttgttattccaaatggaattgaaagtctgaatatattcctcccgaggacaagaagggcatctatgagatccaaacatctgcgaatcaaatccattggggaatttccggttcgtatttgtgcaattctcattatttaattggaatattagttcatataaatattcagaaattgattacttcttttatgcgatttagcagaaatcaaagagtgtgaaggtgaagattaataggtgtggcagatacaaaaagactggccacaacaagaaaagttgtactaatccaatctgaagatgttttgaaatcacatccaactaaactcgactatattgatagaacgatgaccagtttattttttgtttttgtattaggattgggtcattttttgacaatgtatgttgtagtataaacctacattctacttataatttttaatttcgtcttaattcatataaatccctgaagttttataaaaggaaaaataataatacattacaattaatattgtaataatggacaagtacacgtggataacatattgattgggtggtaaacaaaatgtcacacgttaatacttaaagaaaactcaatcgtctaattattaaatattaaaaatttcatttcatagtcaaccaatatttactattttctccaaaatatctcttttaatacagttaatattactaattcattcatcgaaaacaaccccttcaaaaaagtcaaattcattgaatataagttatctctaatcgtagcgccgattcggtgaaaaagtttttcaagcactatttaatcggaaacatcttcttctatacagtttattttgctctagaacaaactggatattcacgagttgtcaccaaaactcacacaaaattctgtgttaccaagagtttatcatggttaactaccatatgcttcacgtgttgtcacctgtacttacaggatggacaatatgtgtctgcctacttagggtttacaaaaaattgtgaatcctaacgcctatgaaatttgctgcattcttgtcgatgaatcggtaattttgttatacctaggtagcgtaaattattttttatgaatggtgcaatgggactatcatttttggtttgcattttgtagggtggtcaaatggaagtaacaatagatcgtcggtacactgctgtttatctagagtcgatgcgggaaaaacagtgaaaaacaataacgagattcattgtccgaaagatctctgcaacaattcggtcaacatccaatccatatggtatatagtttatggataatactgtcgtcaccccagcagaaacaaaggaaaccatcctgtttcaaaacttaactcctttcgactatatagtcgaggacacaatcccaacaaatattttggtgggtaagtaaataaatcatgtttagtcataattgtaagtttcatttttgtccttattagtcaaaatacttttaacctataaagaagttgattgtaatgatgcagaattgcttggggcgatggtaaaggttgggagtttgagtaataggactggcaacattgaagacgttaatggttacaccctcccgttcaagatcatggatcgctagtgagtgatttatatttatattgtttatacataatggtctgcatagttttgtataaaaatatttgttcatattttattgcaacagcaaagtggtattgtcgtgtgaggctttcaggcagaccgctatagactttgaaaaaaactttcgcatgtatggaaggcccaatataattgttgcagtagggtggtggagggttctaaggtcaaattggagggcgaacagagtgaagattgtgagtcatgaatctatatccaaagtttttcctaatccagatattcctgaagttgaagaaattaaaatggtgattgattaatgggtgtttcatgaaaaaattgattatattttatgtaatatgtttctacagaagcctttggtttcagattgtaataacatttatgatattttattttgacaatcctaaatatatggatgattcttaatttgtttgtagttttttgttaggaacatattctaattaaattcattatatccattttgattcattattttcctgtaaaaagaaatctataaattatgaacacattatataatacgtagaatacaaaaaactaaacaggtaatagcaaaacagaactataaaaaagaaacacaaatctttaaaaaaaatttcggttattaaatagtaaagactgtctatcaaaacatagccacaagatgagaatacataaatctttaaaataaacttcagtttgtaaatagtaaactctacattatttcacaggcccggcccaaggctaaagttcatgaagctggtgctttaggcatcacaaatatattgtaaaaattgagtgcatcatttcaaatttaacttgtggcatagtggtgtaatgtactaaacgtccatgagatgacaggtttgagttccttcttttcctttttttttggattttcatttaagttttgtttgttagtgggcttaaaattatttttgctttaggcatggaaatggtttgggccggccctgttatttcataatacattacatgctaaacaacaatatccactttccgaaaaatttctaaagtaaatatctatacactacaacttttaccctaaacattataaaataacactaaaccctaaaccctaaatcctaaacactaaaccctaaacactaatccctaaatcataaaccctaaaccctaaacaataaacaatatagccttaaaatataccctaaacattataaaatataccctaaacactaaataactaagccctaaaccctaaaccctaatacctaaaaacctaatccctaacactaaaccctaatccattccacctaaatcctaaaccctaaaccctaaacaatacaaccttaaaaatataccctaaattcctaatgtctaaagccaaaaccctataacccatactttaaacatgataaaatgaagacaccctataaaataaacccaaaacactaaacctttaacccttaactcttataaatataccatacacacttaattagcagccctatatcctaaaaactgaccctaaacccttaatcttaaaccaaacagccttacctttatccatttacttaaccttgaaaccctaattattaaaatataaacaattaacgttatccatcataacaaagccacgcggttggagaaaaaagtccctataatttggcgggatattcccccccccccccccaaatatttcaaaatcatattataaataagtaaatgtgtgattaggtatcatatgctccaaatacctaaaggatttatactatgctccacaaaatagtttgttagaagagtcactgcatgcatcgtcctgttccgaccaataatctgcatcgctacatccgtagtagaagtcaacaaactcctagacggatggccgaacaaacttgtaatcaaaatctgaaatcaatcatcaggtttcaaaaggaggtaatagttgaggcagtccttataaaagagtctacgtatatttataaagtttttattttggttttttacatatagggaccgccatcaaactttcacatatctgtaggcattcttgcaaaaattgttagctatatagctgaaggtggaattaaggagttaaagaattggataatctccggtagggaaggaatggtagctatatttagtctggatagcctaaaatatgtaatgtttaacaaatgtagagattttgtattgtggtccacacttgataatgtgtacaattcttctttttttccaaatgtgtaaaagaaaaaaatccttatgctttgtatgttaaaagcattattttggcatttctattttttgacttggaagaggcaataatggtcgtcgcagctgctaaagaagtctacccagtcgcagaattattatatattatgttgaacagctgcgctggaacagaggaccgttgaggttccatataaaatcggtgactccaaaggggtgtggaacgtattgtgagacatggtgtttctccgatagcccagtgtgttgggaatcacatcaatttctagatgaatacaatgggggactatacttggtagagcggtgtctagattgtatatacttctacttgtctagagatattatggaaatgtcttcggttataaatgttgaatggtatgtacttagaaatgttgtaaaattattgttcgagcctagttcccgttgttctataaaaaaactaaatgggtatgatttttttgtcctagagatagtccagtgtgatggtagtatagaagttgatgtaggcgcaaaagcaatgatttcttaccatatccacgtggatttttcttagctctgtttgtttattatattgcttaatattcgctaaatttctagacttaaaaattgtggaaagtgtaagtaaaatcgttgtcatggtgcatatatgtaaaaatgtattatgaataacatatgaattttataataaatatcttaacacacttaactatgtgcatatttcattagaacacaacatataatccattggtttacgtttcaaaataccaacacttaatccagctgtaaagatctttatattttaagtcaaataataaaaaaaaaaattggccagagtttaccgtagaagattgcgaaagaaatttgtcgccaatacaatagaaacatcaagtggtggtataaaaagtaaaaaacatccacgtatagcataatatataaaaatgttcctacgaaagtattttaaggatctgacacataccaaggatataaaaagtgaaggtaacatagttgtctaacgaagattattggtgttaagaacctctaatctcaaggcagcttctctctctaacacggttcccgatgtgcgattttgaatctagatctcaaatccagatctagtttttcgaacggtgttgacgagacgacggctctccgacattcacctagtttgcatcatgagccttcgcttctccattgacaatgtctggatctccggctccctctaagctggtcctcttcttttcaaattctcactaagcgttttgctagtgaagacctttctcaccccgtggtgaagatctttctaccctcctgattcggcgattctacgcttctagacatcatgtctcgcaaatttatctactctgagaaaggaaaaggcattgcttccccctgcctccccccaaagatcccaagagtgtctgttccagcttttgatgactctgaactccgacgtaaacattctctaaccattattggaagactcaccaaccctcttgcccaacgggtttggggaatgattccctttctcgcagatctgtggaaaacttccacacgtccgataggcgcggacctagggcaaggacgctttcagtttcaattctccccggaacaagatcttttcagtgcgttggagaaccaaccctaccactatgcaaaatggatggtgattctccaaagatgggaaccgaccacatcctcctcatttccttctaagatccccttttggaatcgatgttcaaggcatccccatccacctttggtcggaagaaatgttcatcagcgttgcaaagggagttgggatctttgaaaaggctgagattactaacacctatgccagaattcgagtgacggtgaatggactgaaaccactcatcaagaagatttttgttgactttgtggatggctcagaggctttagctgatctagtttacgataaacttgaacgtcattgcaagagatgcaataaattggatcacgacgaaaaggattgcccggattctcaaggtctgggagatagaaaagaacgtctcccctctcccccctcttctccttctaaggatcgtcaggatcaaccttctcggcatcttcaaaggaactacgatgatagaaaccagaagcgaccttatcaaggaagatatcaaagacaacgaagccctaagaggcctagaagatcggatcatggacgctactcaaattaaagagaatactctagatttgaccctagaggtagatatgatctttccaagacctcgaatcctagagaaccagttcaggagacctctaggcatcaccagggcagtcgagcttcggcgagtccctctcactctctagacaacaaaagaacctctctcccacagagagcgattaaggaagtctgagatagctctcaaggcctgagtgggtgtaaagaaagatcttcgagagacttatcctccacttccaggattcagaatcctttggctactttgctacctcaaaaagcgttaaatatcgctatgggagagcttagagacgttatgatccaatacgtcaattgtgcagacccgacagagagtgctgcaaggaaagagcgttatagacaagctaaagatcatggacaatttgaagaaaccgctggtcaaataattagggccaatctcagtatcccacctctggctttacaagatctatcccctcagcaaactgcctatcaagagcgaattcctatatctcaaagattaggtcctgttaatgcaccccctttggcaccaaaaccaaagccaaagaagagagttctctcaaaaaggaaagtgggtagaccaccaaccaagaaaagagcccaacaaatgtcataatttagcccagggaacatcgctgttgggctctccaaaaaaaaacggctcctccactatcaaccctctcctagaagacgtctaaatatggaaagcttgagtgaggtacctttgggatcagctggaccttcttttggagcgagctcaagtaaacaacttccccttttgaatgagcctggtagagatccctctctgcaaggatccccgagtttgtctcgccaatccaaaaactcgtctgattttcggctccctcaaatcaacctgacgtaaagatagtatgctggaattgtcaggggatgaggaacccactgacaatccagcgtttaaaggagatacataagatgatctcccgtgatatcttattcttcatggagacgaagaacgatgatggttatgtgttaaagactttagagtggattaattatgaccacaatgcactaatcacaccttagagacatgggggtgggggtttagctttattttggaaacatgagatatatcttgaggtactcactgcctgccctaattattttgatactaacattataataagggataaggctttctttgctaccttcatctatggtgagccagatcagacaaagagatggagtatttgggctcagttaaaggaactttctctatcaaggtctggtgcatggtttttgtctggggattttaacgaaatcattgatggcactgaaaaagtaggtggcctaactagagcggagagttcttttatggacttcagatccttcttatctgaaagcgacctctttgatctcaagcatttgggagaatccttatccaggcggggtatcagatactctcatgtcatcagatgtcgcctagatagagcaattgccaattctgtttggtctgatctgtttccctctggacgcttggagtatctaagatttaagggatcggaccatcgccctattgtgacctactttgcaaagaagaagaagaaaacacgtggggtttttcgttataatagaagactgaagaacaatgctgaagtcactcagctcataaaggagtgttggaacagagagccttccttctcagtcagtcagagaatagcaatctgcaagaaagagattgtggcatggagcagggaaaaacaaaggaatagccagaaacttattgagcaaaagaagatggagctagaacaggcaatggtaagtcctgaaaataatggagatttgctagccaagatcaatctagatctcaccgaagcttataagctgggggaaggttactggaagcaaaggagtagaatcatgtggctatgtttgggagatcggaactcgggtttctttcacgctgtctctaaaaagaggagagcacgaaatcgcctttcagttatagaagatctgtctttgaagaccacaagattactgaagttatttctgcctacttccataagatgtttcactcagacgatttggatgagtctcatacacgagcaactgtgacagaagccctgtctccctgtgtatcggaggagaccaatttggcattgattgcagttccatccctaaaagaaattcatgatgctctaatgggaattcatgcgataaggcgccgggacctgaggacttctccgctagttttttccaatctcactgggattctatcgggcaagctatcatctctaaggtccaaggcttttttcaaatgggtaccatgcctacttcaatcaatgagactttcatcagtctgattctaaagatcactggagccaagaaagtctcttaatatagacctattgctctctataatgtctattataagattgtgtctaaaatcttaactcaaagacttcagccgctccttccaagcctagtgtctgagaaccagtatgcttttatcaagaatagagcaatctctgataatgtcttgataacccatgaagtgccaccaagtattgcttgatggcgggaaagacagatatttctaaagcctatgacaggctcgaatggaatttcatcaaagaggtccttcagtggtttggttttcacagcatttggatcaattggattatgcagtccgtcacaactgtctcctattcctttctcatcaatggttcacctcggggaaaggttgttccatcaaggggaataagacaaggagatccgctctcctcatatatgtttatcctttgtggagaggtgctatcaggtttgtgccactcggcttagaagaaggggctcctacggggagagttcttttgtggacttcagatccttcttatctgaaagcgacctctttgatctcaagcattcgggagaatccttatcctggcggggtatcagatactctcatgtcattagatgtcgcctagatagagcaattgccaattctgtttggactgatctgtttccttctagacgcttggagtatctaagatttaagggatcggaccatcgccctattgtgacctactttgcaaagaagaagaagaaaacacgtggggtttttcgttatgatagaagactgaagaacaatgctgaagtcactcagctcataaaggagtgttggaacagagagccttccttctcagtcagtcagagaatagcaatctgcaggaaagagattgtggcatggagcagggaaaaacaaaggaatagccagaaacttattgagcaaaagaagatggagctagaacaggcaatggtaagtcctgaaaataatgacgatttgctagccaagatcaatctagatctcaccgaagcttataagctgggggaaggttactggaagcaaaggagtagaatcatgtggctatgtttgggagatcagaactcgggtttctttcacgctgtcactaaaaaaaggagagcacgaaattgcctttcagttatagaagatgaatctgggaaccctgtctttgaagaccacaagattactgaagttatttctgcctacttccataagatgtttcactcagacgatttggatgagtctcatacacgagcaactgtcacagaagccctgtctccctgtgtatcggaggagaccaatttggcattgattgcagttccatccctaaaggaaattcatgatgctctaatgggaattcatgcggataaggtgccgggacctgaggacttctccgctagttttttccaatctcactgggattctatcgggcaagctatcatctctaaggtccaaggcttttttcaaatgggtaccatgcctacttcaatcaatgagactttcatcagtctgattctaaagatcattggagccaagaaagtctcttaatatagacctattgctctctataatgtctattataagattgtgtctaaaatcttaactcaaagacttcagccgctccttccaagcctagtgtctgagaaccagtatgcttttatcaagaatagagcaatctctgataatgtcttgataacccatgaagtgccaccaagtattgcttgatggcgggaaagacagatatttctaaagcctatgacaggctcgaatggaatttcatcaaagaggtccttcagtggtttggttttcacagcatttggatcaattggattatgcagtccgtcacaactgtctcctattcctttctcatcaatggttcacctcggggaaaggttgttccatcaaggggaataagacaaggagatccgctctcctcatatatgtttatcctttgtggagaggtgctatcaggtttgtgccactcggcttagaagaaggggctcctacggggagagttcttttgtggacttcagatccttcttatctgaaagcgacctctttgatctcaagcattcgggagaatccttatcctggcggggtatcagatactctcatgtcattagatgtcgcctagatagagcaattgccaattctgtttggactgatctgtttccctctggacgcttggagtatctaagatttaagggatcggaccatcgccctattgtgacctactttgcaaagaagaagaagaaaacacgtggggtttttcgttatgatagaagactgaagaacaatgctgaagtcactcagctcataaaggagtgttggaacagagagccttccttctcagtcagtcagagaatagcaatctgcaggaaagagattgtggcatggagcagggaaaaacaaaggaatagccagaaacttattgagcaaaagaagatggagctagaacaggcaatggtaagtcctgaaaataatgacgatttgctagccaagatcaatctagatctcaccgaagcttataagctgggggaaggttactggaagcaaaggagtagaatcatgtggctatgtttgggagatcagaactcgggtttctttcacgctgtcactaaaaaaaggagagcacgaaattgcctttcagttatagaagatgaatctgggaaccctgtctttgaagaccacaagattactgaagttatttctgcctacttccataagatgtttcactcagacgatttggatgagtctcatacacgagcaactgtcacagaagccctgtctccctgtgtatcggaggagaccaatttggcattgattgcagttccatccctaaaggaaattcatgatgctctaatgggaattcatgcggataaggtgccgggacctgaggacttctccgctagttttttccaatctcactgggattctatcgggcaagctatcatctctaaggtccaaggcttttttcaaatgggtaccatgcctacttcaatcaatgagactttcatcagtctgattctaaagatcactggagccaagaaagtctcttaatataaacctattgctctctataatgtctattataagattgtgtctaaaatcttaactcaaagacttcagccgctccttccaagcctagtgtctgagaaccagtatgcttttatcaagaatagagcaatctctgataatgtcttgataacccatgaagtgctccactacctcaaaaagtcaaatgccaccaagtattgcttgatggcgggaaagacagatatgtctaaagcctatgacaggctcgaatggaatttcatcaaagaggtccttcagtggtttggttttcacagcatttggaataattggattatgcagtccgtcacaactgtctcctattcctttctcatcaatggttcacctcggggaaaggttgttccatcaagaggaataagacagggagatccgctctcctcctatatgtttatcctttgtggagaggtgctatcaggtttgtgccactcggcatagaagaaggggctcctacggggactaaatgttgctagaggcagtccttgcgtgaatcatttgctgtttgcagatgatacaatgttgttctgcaaaacaagtgacaaagcttgcgaggagctgatgagaatcctgaaacgctatgaagaggcttcgggtcagatgatcaatggggataaatcttctatcttcttctcaaggaaaaccccagtttctaagcgggatagagttaaggagctgctgcttatctctaaagagggtggagtggggaaataccttggtttaccgaagctctttggcagaagttaaaatgatattttctcttccattgttgatagaatcagacataacgctctgtgttggtccaacagatttctccctggggcaggaaaaatggtaatgctaaaatgagttcttgcctacatgcccacatatgcttatgtcttgtttcagtttacccatctccctatgcaaaagaatccaaactgcgttaaccaggtttttctgggatagtattcctcataaaagaaagatgagttggattgcttgggagaagctcacaagacctaagcagaaaagagggttgggttttagagatctacagcagttcaatgtggctttgttcgcaaaactcagctggaggttattaaaaaaccctagtagtctcttggcaagggtcctgttggggaagtattgtcctaatactgacttgctaaaagttaaagtttccaagacggcttctcatggctggagaagtatcctgagtggcagagatttgcttgttaaaaacattggctggtcaacaggtgatggtggatccactctaatatgggatgattcgtggatcccttctccggattttatccaacccaagggtctcgttcctctcctttcaaaaggatggagagttaaagatttgttttttcctaatttgattgactggaatgaagcacttgtgaaggatctgttccctgctttgtcagagaatatcttttctattacacctagccggttgtctgcaccagataagaggatctggattcatacccaaaatggtgagtatacggtcaagtcgggttacttcattgctagagaatgtcagtttccctctagtgttggccccctgtttaactggaagaaagaaatctggaacatttgcacttcctagaagattaaagtttttatgtggaaagctctccaaggcgccctctctactggatgtcagcttgctagcggaggcattgaggttgatccggcctataagaagtgtaaggaacctgaaaccattgaccacttgttgttcaattgcagttttgcaaagcaagtctggcttttggctcctttcgccaagggtttgtttctagctagttcagcggatttggaaagtcttgtctctcaagggaacaagctcatctgcctccctcggtgggcctagccagaagtcccctattcccctggctctgctggaacctttggattgctaggaatcaagaagtcttcaatcaaaggtgtttctctgctgaagagacggtacaaaaagcgatcaaggcaaagagcccaatctgttactcttcccccacctggttcaatcttctcggggcaaagagcagttaatcgtaccccgcgctacagggattgtgacttttttataatctacagaacggatgcagcttggagaagtggtgatcatgttgcaggtttgagctggatttttggggactgagttttagatattcccagaagtcactctttggtgtgctctcatgtggcctcgcccctcatggctgaagccatagctgttcgtgcagctctctcaaatgctaggatgctcaagctcccacgcatagctttggagtcggattgtagtaccttggtcacaacgatcattactaaatccaccctcccggaaattcatggcgtgttagctgatatccttctcagctctctatcttttaatctctttgtctgtaatcttattcttacagctgcaacttcggaagcagatgctctagcaaaactttctctctctatgtttgtggaccgttaagcttatcaattaagaagtttcttgatcaaaaaaaaaaaaacatagttgtcttatctcattaataaaaataaattaaaatgaataatacattttgtataatattttactcaacagttctaaaccatgaaccggtttgtatgaaggaatatctattgaaatatccacattgacatatccatgtgtagaaatatttatatttaattcaatgaatttgaaatcacagcggaaaattagccagcaatacgaaggtaggttaaagatattggtttagtgaagtctatatataggatataaactgtaacataacctaatattacctttaaaaatttcttttttaaaatggaagactcccaagaaagcctaactatgtgagctgtagtagaaagttatgaagaaagcgagagttcaaatgtcatagatgtattttaaaatttttattaggaataaagctaatgatagaatgatatgttttaaaaaaatctgtttttattttgtaggtgattccgatgagggaattttacattcctcagccgttgatggagatcattgtaagtaaggttggtgaagatggtgttgatgctttgaagaactagttgctcgctaggagagaggggaaggatactgttccgtcaaagaaaacattagcatccgtacgaattgacaaagaccatcatttcatgtggtggtcaatgactcattcaaagtattacacattcttcaaaaagtgtcttgccgcaaataatccgtatgcgaagtttgtagagaatcacaaaggactggcttatgagttgactatagggtacttccagatgagatttcgttggaaggtgtgccatggtaaacgcattggtggtttactcaacttgaatggcatgaaagtatgcgtagtacagccaccttatcaaccgaaaagagttggtaggccaaggtgatgtaggtgtaagaaagttgagtacaagttgagcacgtgtaaggattaaggatttgaggatgttgtcaggatgatggggaagagttcttgaatattatggacaacgtttttcggaatgttataatccaagttattattgtgttgttatttttggtttcctattagccgtaagtcggacgggaatgttaaaccttgtttgttgggatctttttgttcagttaggtataagtacttcatttgcgtccattgaatggtatctatatatttattattattctatacgtaacctctaccatttagtgatttttattgataattttgcttagtatttatgttatgcataaatgggaggttatccattaaatcgtggatctgtaatgcaaacctttaaatattttgagaatttcgctagaaaatttgtccaacaaaattgcaaggtctaatttattaaaatccacaagaatgttctatctaaaaggttagtacatagatgtctttgtttattgtattgcttaatcctcgagaatgttctatctaaaaagtttgaactggtaagatgtcctaatatgtatgcgctaattaagtaaaagcggaaaaattaccgccaaaactctgatggggtctagtcaaaaataatatgttaagacacaatacatattaatttaaatcggggataagtggatatgtctttgtggatattgattatcatttaaaaataaacgtggactttatattgctacttaattagtaattttatgctacaccctccctgataaccagaatacgtttatctattatgcttagtccattaactatgtagttgtcttaaattttttgatttcccgactatgcataaactacaatataaattagaataaatatcaatgaaaaacatatatatatatatatatatatattaaaagaatacaatatatagtgaaaatatgcgatatggttattgaaaacactgcctaccagaccacatggagttaaactgcaatgttggaaatgccacatataacgtcatgatgtattttgcagtaaaaaataattagacctatatataggcccatcatagcctataacgtgactggcttggggaagataatatggagaaccattccatgcagctgactacacacaactattaacatatcaatcaatccattattgtctgcctaatttataactatttccttgaacacccattaaccaatgtataattattaaggcatagacttaatcaagatttatcaattttaaatcaatgttgtcattcaacaagaaactttcctgctgtttataattagataaccatgtgtaatttttatttttataccaattaatttcaatattaaatatatgcaatttgccgaaaactctctctctatatataatataggtaaccacgtggttacgtatataaatttatattacagtattgtgatagtaggattaccatttatataaaactctctctctaagtcaagccaaccagagagttggttagttctaacagttctagtatgcaataactgaaatgaaatgaaactaaaagtagaaatggcaataacaggcatgtgaataacaaagcagaaatgataacatgcaatcaaatggataaacaattcctaaggatggggtaatcgaatagtgtggtctccttaatctattcaggtggttgacaaaacttcaaagaagctatccctagacaacaagttcaacaacaaattaattcactctcgtgatagaaatcctcaagcaaaactagacactgacctaattcccattagtgatctctaactaagcagacattatcgagtcaacatgttaaagccaataccctctctacagccaatcccttggggtagagtctgatatctctggaattaataggatccaacgcccattaaacgccttctgagcgttggacgtctggactcatattccacattagccagtgaaacaagcaataaccgcaactaatctagaagagattctagtattctaaactcaaccacctaaaacgaccaagtaaaccacaactaatctatcccatcctcagaaatacggttcactactcagacataataaaagacaatagcaaagcaacgattgaaaacatgataacagaaatgacgaaagacttaaacgcaaactgaatatcaaatacttgaaagtgaaaatacaaaatcgcaggagaaacactacagctatgaaagttgcgaaaatgtaaaagttgatgagaaacggaataacaacggatgccctagggaaaaccctaagaggcagtttatataagcgagtgacaagtgtgtattttgcatgttttgagcatccatttgtcatcactttagcaccatatcatcactgttttataccatttctcatcatttgtcatcactttgcatgtttaggataggtttgcatgcatgttgcatatttgtgttgatttcaggtgatttggagatgttgacgagctaactggaagaagcggacctgatcatgtcaaaccactcgaccccgaggtcgggtagaagcttcaaggcctcaacagaccactcgaccccctggttgagtaggggacttctcgatttcatctcatcactcgacccctggccgagtaccaccacgagagatactcgatcacttcactcgacccccaggtcgagtgtcttcacctccaccacctgaccaccactcgatcacaccactctacctggaagtcgagtattaccatcaccaccactcgactacctactcgatggcgagcttcagagtcttcttcattccgcactcaaccagacactcgagcacaagaaagaaaagaagaccccagttattcactcaacctctcactcgaccacctgggtcgagtacagttcttaattcatcccaatactgcgtcgttttgagtattagggtttcggaatattttgctataagtaacatgtactttacattttcgaaaacaagtttttagcttggttttattccgcagacattgtgttctagacctttttgtaatccggatttctctttatctattcagtattcagtattcagtatttgttcttgatttcgtttactgttgttcatcctgttatcattctgctattacattgttgttatcatgttttcatcctgttcaacgtttatgttctctacaatgatgtctgagtagtgaataggtttctaaggatgggttagagtagtgtagaattctcagtatgctaggtggttgagtttgattgatagatcccttttgaattagttgttcttaatgcctattgctttctgatcaactggaatttgagcccagacatttctgcgcccaaaaggtgttcgatgaaatgtctgaaccactaattccaggattcgtggccgtgtaccaaggtattggttgcagggagcgttttggctttaactcgttgattcgtaatgcctgttagtttagctctcgtcaatggtgattgagtctgggactaggttaacttgagggtctctgttgcggtggcacttagatttggttaatgaacttgttgtctagggataatttattgagcatgtcaatcacttgtaaactgaggaaacgaaactactcaattaccccatcctcgggaattctttatctgattgaattctttgtttactctactgttgtttactgcatcttgtcatctgttgcttagtttctacaattctttcctgttactcgacctgatactcgaccacccagttgtctggcaacagactgtgcagtcgaatgtctttgttttgttttttgtctgttactcgacctgtcactcgacctcacccaatgctctgcatcgagctgtgttggtcgagtgttttactctttctgcttgaatttctgttttctgcatgttcacttaggactgctagaacacaccaaaacctgttattgcttggcttgacttagtgacttctgattacatcttgattgttagcatcacacccatttggattgacaacgtaaaatactacaacgacatgattggtgttttaggataattgactaaaaacctattatcaatttggcaccgttgccaattgggtgtttgtttgttacatttgagatttcagacttgtttagatcaagttctttttcaattttcaattcggttgctaactgtgtgtttttcttgttgtcttcttgatccaggtacccctcttctgtatgcaaactcgatcaacaggcaatcagaacctcttttcaacgactacatcgaccgcatagcttgcgaactaagagaaaggagaaacacagtcaaccttgtaccacaacaaccactcgaaatggatgacgaacataatcaagaaaatggccctgccaacattggtgctggggatgcaccacgtgatctccgtcagcggaaagaaattgcacctcctgtgatccagaacaacaacttcgagattaagagtggtctcatctcgatgattcaggggaacaaattccatggtctgccaatggaggatccactcaaccaccttgatgaatttgataggctctgcaacctaacaaaaatcaatggtgtcattgaagacggattcaatctccgtttgtttccattctccttgggcggcaaagcacacatttgggagaagaatctgccccatgactcaatcaccacctgggatgattgcaagaaggcctttctatcaaagttcttctccaacgccagaactgcaagactcagaaatgagatctctggctttttacagaaggctggtgaaagcttctgtgaagcatgggagcgtttcaagggttacaccaaccaatgccctcatcatggctttactaaagcctctctgctcagcactctttacagaggagttctaccacgcatcagaatgcttctagatacagccagcaatgggaatttccaaacagaacaaagatgttgaagaaggctgagaattggttgagaaccttgttcaatcagatggtaattacaacgaggactgcgataggaccgtcagaagcacagctgactctgatgacaaacacaggaaggagatcaaagcgctgaatgacaagctggacaggattcttcttagccagcaaaagcatgtgcacttccttgttgatgacgaaaaatatcaggtccaagatgggagggtaaccagttggaagaagtcagctacatcaacaacaaccagagtggctacaaagggtataacaacttcaaaaccaacaaccccaacctctcctaccgcagcacaaacgttgctaatcgtcaagatcaagtgtatcctccacaacaacaacaaggtcagaacaaaccttttgttccttacaatcaaggttttgctcctaagcagcaatttcaggggaattaccagccgcaaccaccacctgggtttgcacctcagcaaaaccaaggtcctgctactcctgaggctgacatgaaacaaatggtacaacagctgcttcacgggcaagcctctggctccatggagttggcaaagaagatatctaagttacataacaagctgcactgtagctacaatgatctcaatgtcaaggtggaaacactgaataccaaagtccgatacttagagggacattctgcatcttcttcagctccaaaccagataagcctactaccaggcaaagcaattcagaacccaaaagaatatgctcacgctatctctctgcgtagtggaaaagcacttgaaactagggaggacccaaagacagtcactgacgacagtgaagatcaagatgggccactcgagctgccactcgaccactttactcgaccaactactcgagcaacctccccagcaacatcaccaactgctccaaaaccagttgctgtcaagaacaaagaaaaggtctttgtccctcctccttacaaaccacagcttccatttcctggccgtcacaagaaagcattggcagataagtatagagctatgtttgccaagaacattatggaggttgagttgcggatacctcttgttgacgctctagcgctaatcccagactctcacaagtttttgaaagagttgatcgtggagagaattcaagaagtgcaaggatggtggtattgagccatgaatgcagtgctatcatacagaagaagatcattcctaagaagctaagtgatcctggttcattcactctaccatgctctttaggtccattggctttcaacagatgcctatgtgatttaggagcattagtcaatctcatgccgctctctgtcgtcaaaagattggggttcactcaatacaaatcctgcagtatatccctcatcctagctgacaggtcagtaaggatccctcatggtttgctcgaaaacctaccaatcaggatcgaagctgtggagataccaactgactttgtagtcctggagatggatgaagaacccaaggacccgttgattctagggagacctttcttagcaactgcaggagcaatgattgatgtcaagaaagggaagattgatctaaaccttggcaaggattttgggatgagcgaagaagggtcaacacgagttcaacctgcacactcgaggacatactcgaccagccactcgaccttgtctgccaacgaatctggggagccgatcatcccaacttcagatgactggtctgaactcaaggcgccgaaggtggatctcaaaccatttcctaaaggtctaaggtacgcattccttggtccaaactctacttatcctgtgatcattaatgctgagataaatgatgatgaagtgaacctgctattatctgagcttagaaagtataggagagcaattggttattcattatctgacattaagggaatttcacctagtttatgctaccataggatccatcttgaaaacgaatcctattctagcattgaaccacagaggaggttaaatcccaacttgaaagaagtagtaaaaaaagaaattttgaaactgcttgatgctggtgtcatctaccctatctctgatagtacttaggtttctccagtgcattgcgtccctaaaaaaggtggaatgactgttgtcaaaaatgtaaaggatgaactgatccctactagaactataacgggtcatagaattttcattgattataggaagctaaatgctgcatctaggaaagatcattttcctttaccattcattgatcaaatgcttgaacgtttagctaatcatccatactattgctttcttgatggatatagtggtttctttcaaataccaattcaccctaatgataaaaaaaaaaccactttcacatgtccttatggaacttttgcttatagagaatgccattcggtttatgtaatgctcctgcaatatttcagaggtgtatgacctctatattttcagttttaatcaaggagatggtggaggttttcatggacgatttttcggtttatggcccctctttctcctcatgtttgttgaatcttggcagggtactgaaggtgcgaagagacgaatcttgttctcaattgggaaagagttccaccaactgaacgctgttgaaggaggatctccatggtatgctgatcacgtcaattacttggcatgcggaatagagcctcccaacctgaccagttatgaaaggaagaattttttcagagacatccaccattactactgggatgagccttatctttacactctctgtaaagataagatctacaggagttacgtctcagaagatgaagtagaaggtatcctgctgcattgccatgactcagcatatggtggtcacttcgcaacgttcaaaacagtgtcaaagattcttcaagcaggcttttggtggccaacaatgtttaaggacgctcaagagtttgtttcaaagtgtgattcatgccagagaaaaggcaatatcagcagaagaaatgagatgcctcagaatccaatcttggaagttgatatctttgatgtatgggggattgattttatgggtccattcccatcttcatacggtaacaagtatatactggtcgtcgtagactatgtatcaaagtgggttgaagctattgctagtcctaccaacgatgcaaaagttgtgctgaagctattcaagaccataatcttcccgagatttggagtttcttgggtagtaatcagtgatggtgggaagcatttcatcaacaaggtttttgagaacctcctgaagaagcatggagtaaagcacaaggtcgctactccctatcatccacagacgagcgggcaggttgagatctccaatagggagataaaaacaattctggaaaagactgttgggattacaaggaaagactggtctacaaagctcgatgacgcattatgggcttacaagacagctttcaagacccccattggtacaactcctttcaatcttctctgtgtaaaatcatgtcacctacatgttgagctcgagtacaaagcaatgtgggcggtaaaacttctgaactttgacataaaaactgctgaggagaagcgattgatccaactcagtgaacttgacgagatccgtttagaagcttatgagagctctaaaatctacaaggagagaactaagcttttccatgacaaaaagatcatcaccaaggattttcaggttggtgatcaggtgctgctattcaactctcgtttgaaaatctttccaggaaagcttaaatccagatggtctggccccttctgtatcactgaggtccgtccttatggagcagtcactctagctggtaagagtggagtattcacagtaaatggtcaaaggctcaagaaatacttagcaaatcaaatccttccagaggtgacatcgattcatctccaggaacttcttgatgattaaaggagaaaaggagtcaagctaatgactttaaacaagctcacttgggaggaagtcccatgactatctctgtaaataattttttcttcacttgttatttttgatttgtcttagttgtgattgtggttctcaggaacaaaataacaacgtggagatagagtaaaaattcaaaacttttactctacagaagacctggagatcgagtgtatagcccgttgaagtacaaaattttgaaaatcttctgttgcacctggagaccttgcactcgagtatattggtcgagtatgtgtgatgtttaaaacccaaaaatttttaaatcatcattttactcgaccaacagaagctacagagtcttacagggagtttaacaagtttacagtagttttcccagtcaacagagtgtggaccacgcgctgaggaaaagatggagagagaatctcaaactcaatctccaccaccccttttgaaacttcactcgacctctgaaacctaagccgcgctcgacctcgctgaaatcactcgaccgccgcctgaaagaattctctgccgtctcagacgagttccacgactcactcgactaccgattccggttcaacctgaatcactcgaccgctacgtaaccgactctccaatcattctactcgaccacgaatcgccatctctcaccaaagagttactctgactcaatttcactcgagctcctcacttcgacgttcgccatcaccttgttctcgccacactcgaccgtttctgcgccgccgcagtcgagtcctttactcgacctctgaagatctactcgactacatccagcagactcgacccccgatttttggttttgttcctcccaattctggctcaccgataaagcactagaccttctaaactcaccagctgtactgatttcatcaatctcactcgaccccgtaagatttactcgaccacaggtttcttttcagcttgattcacttaagcagaactctacgagagcccagtttactcaaatacaagacatactcgaccaatttggttcattccattgcttgttgataacaattttgattcaattgttatctttgagactaacctattgacatttgggttttcagttgtaaatcttctgcaggaaaatcatgagtaattatagtggtagttcttccattgatcctgactacaacatggaagagacagagtcgtcatcttcgaggccagagagagaacagagagaatatgatagcttcagaagaaaggctgagatagctctagggaagagagcaatgacagagaggtatgagcttatagatgaggatctggaagacaagtacatgcctgagcatactcggagagccaccaaacttctgcacaaacctgatgtattgcctgctgaggaatatattaggctcttcaaactgaatgagttttgtagcacgaggtatccatgctcgaccacacttgcacagctcagattgttggaggatgttcagcacctgtaccagagttgtcatctggacactctgatggcgtatccatatgtagcatatgaagaagagacaattcagttcctctccacaatgcaagtggagctctaccaaggtatgacctctgctgagttggattgtgaaggattgggattcttgagattttctgtgtatagtcatgagtataggttatcaatcaagcgcttggaaggattgtttggtttccccaatggaacggaaactaagcccaagtatgacaaagaagagttgaaagacttgtggattaccattggcagctctataccactgaattcttccaggtcaaagagcaatcagatacgtagccctgtcatcaggtacttccagcgttctatagccaatgtactctactcctgagagatcacaaggacagaagtaattctgatatggagatgatcgctatggctctcaagggaactcttcgcgaaactaagaacggcatgtctctccaaggtgaaatcaatgacacacctctctctgtactttttctgatccatctgtgtggatacaagagctgggctgtcggcaataacaaaagagaacactaggcgctctgtgcataggtggtgttgtgacaccgattctgatcgcttgtggagtcacaatcacatctgatggactcgagccatgggcaatggatatcgagcatctacgccactgcgaattcctagagttcgtaatggttggcgacttgcaccggttcaggtttgagcactctacagataagagagctaacatccttctccctagccctgaggttacacggataatagagggagataacattgattttcggcctgagattggacgcctctactatgagaacgctccgccattggatgaggatgatcttctaggagaggatgctgaggatgggatggatgaagacagagcagtggagttcgacactagcatgtatcactttggtgaacatgtacctccagcgagggagagcaagagcttgagtgaagctcataggaacaacagtaaactgcagaagttgtgcaagaagcaggacaagctgctcgccaagtgtttcaagacgatcaagtttctgacagataagctgagttgttcctcctccgctactactattccacagggacagcctcctctagagatgccatcgaggagatttgatgagcctgagcacaggcctgagcacaggcctgagcttagtgagcagagagtctcacatgtcccggctaggcattcgtcattcgaatcccgggagcacaagagaaggaggaaggctacactcactcgatctagcagcagatcacacataattcactcgaggagatcacttgaccgcggtgctggccgcatcagaagaagagaggtcgggtatcctcagagcggtgctgggcgccacagagcttatgagctcgagtacccacctgctggagctgatacggaacagggcggttcgtctatggcctgggagcaatcacaggcagccattgacgaccaactccgttcattcttcgactgaggtaagcgcctcacttcaccatcgtattatatcatctgttgtgagttgttctttactttgtttctttgattggatttgtccacagtactctcttccaagtttattcacacagtggactgtgtgatttaagtttgggggagggctcaggaagtgtgtgttgcattgtgtatatttttgagtctgcattcatctaaggcataggaaaaccaaaaaaaattgaaaattttcagaaaatgatttcacaaaaaaaagagtgttcatgtagttgtattacatttaagatcgagtctagagtgtttcatttaggattgttgcatatgcatcggggataatgatgagatagccttgtaagcattttggttcaccggataaactcagtgccctcgttgctagttgtctgttgcgtagtcaatgaatttgaaaataaactgaaccatgcctagattgctctatcaatttgaacctgaatctgatctttaattatcatgtctgcatcaaatttgaactcatggataccctaaaatacttggattttcttattcattttgattactcttgttaatccaagtagctgactctccttattagagtagttaacccaaacccaaacctagacttctttcaagccctatatcacttgtgagtgtttgtgagctcttattccgattaagcttggtagaaagtgttaggttcgtaacgacagagatagtgtctcatgtagttctagttcgcatttttcggactagataggactaggtgggcgtttatactttgggttgggatgtgtttaaaagaaaaaaaaggggttgattcattgatgagaaaaagtaaaagactttaggtgaagtaatctaaagaagcagaaaaagtctagtaaaggttttgggatttgtataaaaagaaagagttcttgttagctattgaagatgggcaaaacccctcagttttaaaatgttaaaaacaggaaccttagttgttaaagaaatccaaatccgctagatgtatcaaagtgttgagaaagcttctcctagagttaagagaaaataaaagaatgattagaaaaagggcttacaagattcatgaatgcaaagggtagagttaagttcttatattgggattcgagatgggattaccattagagattcatttgatatactctgggtagatgatcttatattgatcttatctctgtatgcatagcttgggacttacctttagcattctactaaagcttaatcattttttgagagatcccctgttactgaagcctattctgtaagggaccatctttgtcttttgaccttttaccttagccaaatgagttcattgatgatgcattgcttgattcacgttccagaactaaagaatgttaaagggattggtagatttgaaaacatgtgtaggtcgagcatatgagtcgaattataataaggcatggctaacgtttttgagtagaattcgaccatatcgccgcttagaactatcaacttggacattgattttatctggtttatctggtgttttggctctgagtccccgctttcaaacctcacctccagcttgttcttgattgtttgcttgagggcaagaaaatactaagtttgggggagttgataagtgtgtattttgcatgttttgagcatccatttgtcatcactttagcaccatatcatcactgttttataccatttctcatcatttgtcatcactttgcatgtttaggataggtttgcatgcatgttgcaaatttgtgttgatttcaggtgatttggagctgttgacgagctaactggaagaagcggacctgatcatgtcaaaccacaatagaccacttgaccccttggtcgagtaggggacttctcgatttcatctcatcactcgaccccctagcagagtaccaccacgagagatactcgatcacttcactcgaccccctggtcgagtgtcttcacctccaccacctgaccaccactcgatcacaccactctacctggaagtcgagtatcaccatcaccaccactcgaatacctactcgatggcgagcttcagagtcttctccattccgcactcaaccagacactcgagcacaaggaagaaaagaagactcctgctattcactcgacctctcactcgaccacctgggtcgagtacagttcttaatccgtcccaatactcatcgttttgagtattagggttttggaatattttgctataggtagcatgtactttacattttcgaaaacaagtttttatctaggttttattccgcagacgttgtgttctagatctttttgtaatccggatttctctttatttattcagtatttagtatgtagtatttgttcttgatttcgtttattggttttcatcctgttatcattctgctattacactgttgttatcatgttttcatcctgttcaacgtttatgttctctacaatgatgtctgagtagtgaataggtttttaaggatgggttacagtagtgtagaattctcagtatgctaggtggttgagtttgattgatagatcccttctggattagttgttcttaatgcctattgctttctgatcaactggaatttgagcccagatatttccgcgcccaaaaggtgttcgatgaaatgtctgagccactaattccagagattcgtggccctgtagcaaggtattggttgcagggagcgttttggctttaacttgttgattcgtaatgcatgttagtttagttctcgtcaatggtgattgagtctgggactaggttaacttgagggtctctgttgcggtggcacttagatttggttaatgaacttgttgtctagggataatttattgagcatgtcaatcacctgtaaactgaggaaacgaaactactcaattaccccatcctcggaaattctttatctgattgaattctttgtttactctactgttgtttactggatcttgtcatctgtagcttagtttctataattctttcctgttactcgacctgatactcgaccaccgagttgtctggcaacagactctgtagtcgagtgtctttgttttttttttgtctgttactcgacctgtcactcgacctgtcactcgacctcacccagtgctctgcatcgagctgtgttggtcgagtgttttactctttctgtttgattttctgttttctgcatgttcacttaggactgctagaacacaccaaaacctgttattgcttggcttgacttagtgacttctgatcacatcttgattgttgtcatcacacttatttggattgacaacctaaaatactacaacaacatgattggtgttttagaataattgactaaaaacctattatcagcaagaaatgaaacaaataaggaaactagatatatagcgaatcttcacgtcatgaccctgcgaccgaatgtgtcattggcatctgatgggctgaaatgagtttccctgtgatcgagtatgtcattgataaaactaggcttcaggggctccgccttgcgatcgagtgagatgtagtgaagtcgagattgaatggtccagcgaccctgtgatcgagtgcgatcgagtggatctcattaggagatggtcaagtggttctgatggtgtgattcctccgacttcgcgattgagttaaactgagctggtagcttctccgaagttgcgatagaatgatttgccctggcagggctccgaagctgcgatagagtacttttgctgaaggcgtcattgggcattctgacttcatgttctgtttctcctctgtttgaactccaaaagcatccaaagtacctgaaaacaaccaaatatccaatgcacatgcaatcctaatgcaaaatcatcctaagtatgcaaaacacactaaaacgactcctaatgagatgaaatgtggataaaacaatgacaaagtggtgaagaatgagtgcctcaatcatgcaaattataggcatatcaactcccccaaactaagtctttgcttgccctctagtaaacaagaagacataagcggaaggagaggtttgaagttggggattcataaccaaaacatgagatatgacaattaagatcaatgtaccagctaacagttctaagatgcgaggtgatcgacttctacttaaaaactttagtcatgctttgttatgatccaaacctacactcaaatgcacaatgcgtcaagatcaaccaatccctttaacattcattaagttcaaaaacatgaatcaacatatgcatcgctagtgaactcatttggctaatgacaggttatgagacagagatggtcccttttaagtggttcagattttaatagcagaggactctcaatgaaaaaggactgagctttagaagaatgctaaaggtaaatgccaacctatgcatacaagaatagcaccccatctacccaatgacataaaccgtgaataacaagtagatggtcctatctctaaacccaatgatgatcctaagtctacctttttgcactaaaggcatatttcagtttttactcggatcaatgtttccttcttctctttgactcttgttcttaaggagaagcttttcttaaactctataagtttagtctagtgaattgggttcttgttaaactcttatggctcttatattttttttttcttttctgtttttgttcctatctttttttaagagcatatcttaacagttctatgcttctcaaacattcactagaccttaatgtgattttcagcttccttctcctaaagactattacccattttttttctttctttttcttttcacactcaatctcaatccgcaaataagtttccacctagtcctaccaagtctaaaaacgcggattggaactacatgagatactactcttgtcggctcaaacctaacacgttctaccaagctcaatcctgaaaatagtcctcacatgctctcacaaaataacatggcttgaaagaagggttggttaagggtgggggaactactccaataatagaagtagctacttggattaacaagagtggtgaataagtgaaagaaaatctaaaacgatgcaaacatgataattataagtcagattcaagttcaaattgacaggaaaaggtgtcatgacatgcatcgagtggtttctatagaatatggtgcagttttacttcaaagtcattcaaatgcctcagagaactaataacacattttagtgaatcatcatgctatgcatatgcaacaatcctatatgaaacactctagaatcgatcctaaatgtaatgcaactaaatgatcactctgtttttgtgaaattcattttcaaaatttttcaattttttttttgttttttttatgacttagatgatatgcagactcaattgatattcacaaaaaacaagtcaaatacgttttgaaccctcccacaaacttaaattacacagtcccttgtgtaatcaaaatttgtgaaagaattcaagataaacacagaaacaaaaacaaaagcggtatttacaaagggttttggtgtgttacctcagtagaatgtcttggagatgtagtcatccatatctgcttgagtgtacttgtggtggtgagaagtcgatgttgtttctcaccgtgatggttgtcatttcactgaatgggagaagaatagttgcttttcctgttgacgggtgatcaaacttgaaagcgtaccttctgtcatagaccttatgctcgatcacatgggccagcttgagatgggcgatatccatccaacgtggttggattggatccgttcgaagcgggacgtcgcacgataggaggattggtgtgaccactcctccaatgcaaagggctccttttgcgttcttcttgtcattggccagcgtccaccctttgtagctgcataagtgattgaagagatacattgacggtggtgtgtcattggtatctcctttcatcgttttcccgtccttggtgtaacggaggaaactcagcagcgccaggtctaacgtctccatgtcttgattcgtcactgtggcggatatctccctagcgtaagggacattggccatggctctttggaaattacgaatggtggggttgcggatggagttgctcttggatctagcggagttgaagctggtggtgtctccgatcgtgtttcacaaagattttaattcttctcgggcaaacttcggtttcgttcccgtgccactgggaaacccgaacatggattccagcgtcttgatcgccatgatatagtcgcggtcgttgatggtgaagcttaagtaaccaagcccttcttctcttaactcaacagctgacaacccctcaaacaattccacttgaagtgatgaaaggaattgaagtgtctcatcctcataggtaggatagggatgagacatgagtgttgtcatgtggcatttctcgaacaagagctgaacgtcctccaggatgcctaactccgccattgtctccgggtgaggatatcttgttccccaaaatggatttcttttgagagccttgtagtagtctcccggggtcagcttgtcttctttcatcagggacttggtggtcttgcgggtttgctccagaatgtatttagcatcatcccttatctcttcatcgaccagctcagaattttccgtcattgacctcttccctctggctatctcttctcttcttctgtcattagcagcggctcgctccgtttcttctcggaaacattggtactccttcgcttctctctctggtcttgttgaccatgactacgcctcgtcaacgttgaaatcaacatccatcgatgaatcataactgtatgaggtcattgttcctgaaattgattcaaaactcacaactaaactttagtaagttcgttatcaaatctaaggaggagaagtgagagaattgacttcctgaacttcagcgatagtgtgatcgagtaagagaggtggacaggagctcagagtggttgtgatcgagtaagagagggagagaaacaaacgtggagacgttgcgggtttgcgatcgagtggaaagaagtaagaaccgggtctcgggagtttgcgatcgagtgaacttgatgaggatggcttgagatcgattaagtgagagacttgaggcggttgagcttcacggggttgtgatcgagtgaaagaaggcgaggcgtcgggagcttgcgatcgagtgaagtaaacttccaagggtcgagaggcttgcgatcgagttaaggcagcgcttaaagagagagaagcttgcgatcgagtatgagagagagagagagatgttgttgtgaggtgtgattaatattggatgaggagcttgatatttataggaagaggaggaggtagatgcgccccttaggtaggtgaggagagctcttcccttggcaaaaacgtgatgagaggtgggtggtgagaactattgatttgttgacatttttgtcatgggggacaaggtgggcttcaccggttttgtcattgggaagtgatggcctgatttctcccactccacgtactcgatcacgccttggacttgaacgggtcactgcacgttttcgttcctttgttcagcgccgttatcaaaattttcgaactattacttccagggaaatgaaccactcgatcgcgaagtttgaaaaccgtcttgacttcgtgagcgagtgactccactattcaccctataaaacactattcaccctgtagatcactattcaccttgtagttgatttttgttgcttactttcctgagattaaaacaccaccaaagtgagttagaaaacaataagaaagttaaaattatatacaaagatagtcatgagattccttccaagtgagcttgtttagagtctctagcttgactcctcacgcttattgggcgttgggtggttcttccagtggaacagaagttccttctggaattgtttgctctgccatatattgctttagtctttggccgttaaccgtgaagtcgtcaccttttccagacaacgtgatagctccatatggtcttactgcattgacactgaaggggccacaccacctagacttgagtaggaaaaagtttcaagcgagaattgaatagcaacacttgatcaccaactttaaaatcttttgaagttattttcttgtcatgaaacgacttggtcctttccttgtaaattttagagctctcgtatgcttctagacgaagctcatcaaggtcattgagctgtatcaatcttttctcttcagcattcttgatgtcaaaatttaaaagtttcactgcctacatagctttgtactccagttcaacaggtaagtgacaggatttcccataaagaagattgaacggggttgtaccaatggggttcttgaaagctgttctgtacgcccataacgcatcgtcgaggtttacaaaccaatctctcctggtgatcccgacagttttctctagaatcgattttatctccctgttaaagatttccacctagccacttgtctgtggatggtaaggagtcgctaccttatgtttaaccaaattcttcctcagtagactctcgaaaactttgttgacaaagtgcgtgcctccatcactaatgactattctaggaactccaaatcttgggaagatgatgctcttgaataacttcaggacgactctagcatcattcgtacggctggctattgcttccacccatttttacacatagtctactgcaaccaatatatacttattcccgtacgaggacggaaactgacccatgaaatcaattccccatacgtcaaaaatctgaacctctaaaatcgggttctgaggcatctcatttcttctgttgatgtttccccttctctgacacgaatcacactttgaaatgaactcttgagcgtctttgaacatggttggccaccaaaatcctgcttgcaggattttagatactttcttgaacgttgcgaaatggccgccgtagctggtaccatgacagtgctgcaagataccttctatttcatcttctaagacacacctccaatagattttatctttgtagagagtgtagaggcttctttcttttgaagaacttctttgaagcgatttatgtctttgaagaacttctttcttttgtaccctgacaaattcagaggctcttcaccacatgccaagtagttgacataatcagcgtaccacggaagtttctcctccattgcaagcatctcatcccaaaactggctgcttttgaattttttgttcacttctcggatggccataagctgttcctcaggcttggtgtcgtcaatagggactgcatcttcaattttcattcgcgataagtgatcagctacaccttttttgatcccctttttatccactatctccatatcgaattcttggagcagcaaaatccatctcagcaacctcggcttggtatctttctttgcatagatgtgcctcagagcagcatgatcagtgtaaactgtcactttagagcctaccaggtagctcctaaacttttcgaatgcaaagaccacagccaataattctttctctgtagtggcataccttacttgtgcatcatccatcgttcttctagcgtagtagatgacgtgcaaattcttatcaatcctttgtcctagaaccgctcccacatcgtaatccgaagcatcacacatgatttcaaaagggtgatcccaattaggtgcttggactattggagtagagatcagtgcttctttgatcaatttgaaagcagccagacattcttcatcaaacgtgaactcagcctctttgcacaacagcctggtgagtggcctagccaacttagagaaatccttgatgaatctcttgtagaacccagcatgtccgagaaaacttctgatgtctttcacagtctttggtggctgcaactgcaccatgacatcaacttttgccctatcaacttctatcccatttcctgatattttgtgccccaagacgattccttctctgaccatgaattgacatttttcccaattcagcaccaggtttgtctcttcgcatctcttgagtaccctgcacagattaagcaaacaggaggagaaagaagagccatacacagaaaaatcattcatgaatacctctaccatctcctttatcaaatcggagaaaatagaagtcatgtatcgctggaaagtggcaggcgcattacaaagcccaaaaggcattcgtttataagcaaaagtcccacagggacacgtgaatgtagttttctcttggtcatttgggtggatagggatttgaaaaaatccgctataaccatctagaaaacagtaataggggtgattggctaatctttttagcatttggtcaatgaaaggtaaggggaagagatctttcctagtggctgcattaagcttcttatagtcaatacatatcctgtgtcctgttatggtccttgtgggtagtagttcatctttagaatatttaataactgtcatacctccttttataggaacacaatgaactggagatacccaagtgctatcagatatagggtagattacacttgcatctaatagtttaagtatctctttttttacaacttctttcaagtttggatttaatctcctctgaggttcaatgctagaataggattcattttctagatggattctatgagtgcacaaagtgggtgaaatccccttgatgtcatctagtgaataacctatggtttttctatactttttcaattcaattataagcaaatttacttgttcagtatctatttcatcattcactatcactggataggtggaattgattccaagaaaaacataccttagcccttttggaagcggtttcaggtcaaccttgggtgccttgagctcagaccaatcgtcaggtggtgattcagcgtcagagatggaatcgtgatcgagtgaagcgatcgagtgatgtagctcgccttgcgatcgagtgacgtgatcgagtgggtcattcgtgcggtcgagtggtctcaactcctcaaagtcttctgagtcatcgacttccctgctcatatccatcagcttctggtatcccaaagtttccacatgtaagtctttttctctactgtctttggtcagggcgctctgtaagtggtcgtcctctgctagttcttctaaaagctcgtcagctagcaattatgtctcttctgtccagaaaactttaccctctattgtgggctttttcatcatgttggtgatgtcgaaagtcatccgaagatctttcccgaggttgaggtcgatctttcctttcttgacatcgatgatggctcctgctgtagataaaactggtcttcccagaatcaatgggtctttcggctcttcgtccatatccagcaccacaaagtcggtaggtacttctattagaacctatcttgacaggtaagtcttccaacaggccatgaggtatcctgatggatttgtccgccagaattagcgaaatgttgcaagttttatatttatcaaaaccaagtttcttggctactgagagaggcatcagacccaccgaagcacctagattgcataagcatcttgtgaatgttaaagggcctagtgagcatggtagagtgaatgagcctggatctcccaatttcctaggtatgaccttctgttggataattgcactgcactcatgacttaacaccaccattcctttgacttctttgatcctttctgtgatcaggtctttcacgtagttgtgagagtcaggtatcagcgcgaaatagtctaccaagggcatagtgacatcaagatcctttatctgtttttccaaaagagcacggtatttcgcaatcagaacttttttaaaacgaccagggaatggaagcggtagtttgtagggcgatggtacgaagactgtggctttggtttttgcagctaccagtttttcaacagagggagtagctggtgggacttgtggttgagtgggttgactcgtgagagtgggctcttcgattgttttgtcagccaaaacatcatcttgataaatatcctccccctcttgaaccatactgtcctcagtgttggggttaggctctcctcttggtggcaacgctcatccgcttcttagagtaattgcgtgggcatactcctttgaattatgtattggtttccctgggatgtatcctggtgtggttgatgtagaagcgattgtgccttctatatattgtacccttttactcaatgattcgatcccgctactcatttcaacgaactttttgtcaaatttgctgtttaagtcagccatcttcttagcggcttccattacccccgcgacacttggaggagtttgttgattttgtcatggagagctttaatatctcggcggtgcttgtcatcagattcagtactggtgtggatgcttctgtcataatcctcgttgtaattgtcatccgacttagccatgttttcaactagctcccatccgtcttcgagatccttgtttaggaaattcccattggaggcggtgtcaaggagcatacgtattttaggcaggacgcctctttaaagtgtgctgagaagggaagattccttaaatccatgatgagggcatttggtttgataacccttaaagcgctcccaagcttcacagaagctttcattttgcttctgagtgaatccggatatctcattccggagtcttgcagtcttggagttggagaagaattttgccaagaaggcctttttgcagtcattccaggtcgtgattgatccctggggtaacgtcttttcccacagatgggctttatctccaagtgaaaatggaaacaagcgaagcttgaaagcatcttcactaactccattgattttagtaaggccacagagcctttcgaactcgtcaagatgatctagcgaatcctccattggcaggccatgaaacttgtttccctgaaccattgcaatgagaccgcttttgatctcaaatttgttgttctgtactggaggtggaacaattccatgacgatggttgtggttgtgaggaaagtcactagcaccagtgttggtaggttgctcttgctcatctacaacgtcagccattgtgtcggtatctgtctgttctctcagttagcgagcaatacggtcaaggttatcgttgaataggaggttctgatttccttgtgaccattgtgtcggtttctgtctgttctctcagttggcgagcaatacggtcgatgttattgttgaataggatgttctgatttccttgtgaccatgtatgcatgcaacaaatagcagccgagctataacagacgaatcagagatgcgtctgtaaagcgggttgcaaggtaccgaaacaaaaacatcgaccgtattgctcgccaactgtgtaacaaaaacgaacttgatcttaacgtttctaatgatatcaaatatagcaaacaaacaccaaacgcgccacggtgccaaattgatagtaggatttttctcaattaatcctaaaacattatcctgtcgttgtattattttaggttgtcaatccaatccggtgtgatgcaaacagatgagatatgattagaaagctctaagtcaagccacgcagagagttgattggttctaatagtcctagtatgcaataacagaaatgaaatgaaactaaaagcagatttggcaataacaggctggtgaataacaaagcagaaatgataacaggcaatcaaatggataaacgattcctaaggatggggtaatcgaatagtgtggtctccttaatctattcaggtggttgacaaaacttcacagaagctatccatagacaacaagttcaacaacagattaattcactcccgtgatagaaatcctcaaggaaagctagacactgacctaattcccattagcaatctctaactaagaaggtactatcgaatcaacatgttaaagccaataccctctctacagccaatcccttggggtagagtcagatatctctagaattaataggatccaacggccattaaacgccttctgagcgctggacgtctggactcatattccacattagcccgtgaaacaagcaataatcacaactaatccagaagggattctagtattctaaactcaaccacctaaaacgaccaagtaaaccacaactaatctatcccatcctcagaaatacggttcactactcagacataatcaaagacaatatcaaagcaacgattgaaaacatgataacagaaataacgaaatacttaaacgaaaactgaatatcaaatacttgaaagtgaaaatacaaagtcgcaggagaaacactgcggctatgaaagttgcgaaaatgtaaaagttgatgagaaacgaaataacaacggatgccctagggaaaaccctaagaggcagtttatataagcgagaaatgaaacaaataaggaaaatagatatatagcgaatcttcacgtcatgaccctgcgaccgaatgtgtcattggcatctgatgggctgaaatgagcttccatgtgatcgagtatgtcattgatcaaactgggcttcaaggctccgccttgcgagcgagtgagatgtagtgaagtcgagattgaatggtccagcaaccctgtgatcaagtgcgatcgagtggatgtcattaggtgatggtcgagtggttctgatggggtgattcctccggcttcgcaattgagtgaaactgagctgctagcttctccagggttgcgatagagtgatttgccctggcagggctccgaggctgcgatagagtacttttactgaaggcgtcattgggcatcctgacttcccattctgtttttcctctgtttgaactccaaaagcatccaaagtacctgaaaacaaccaaatatgcaatgcacatgcaatcctaatgcaaaaccttcctaagtatgcaaaacacactaaaacgactcctaatgagctgaaatgtggatgaaacaatgacaaagtggtgaagaatgagtgtctaaattatgcaaattatagacatatcatattggcttagaaaattatgagaatataagcattaaaattagataaaattcagtaccgttgatgagaaggataatgaattcgtacaaaccataacattacaaagcagtgttaaacaacactacaagaaaattaccatttaccgacttcagtagtagtcactctgtagtcggttaacaccactttacgacaaataaacgactattaaatttagtcgctaatcgagagtcggtaaatacggtagtcgtattttagtcgccaaagagcgactaagttacgactaagttaaagtaatcgcttttttagtgacattttagtcgttaaatttagcgactattggacgacaaattaacgattaacttgagggttatgtagtcgttgtaggtaattagtcgttaaaatttacgactatgttgtcactatatttaagactgatttgcgactgaaatatcatttagtcagaaattttagtgactgaattgttatcaaaaaccgactgcttggttacattttttatgactaaatttgcgactattggttttattagaacacctatatgattgttctaaagatggaaaccttcctgcaaaaacaaaacattacaagaagcataaacacaatacaagaagcatgaaaacaaatttattatcatttcagaaaagtacaaaacccaaattacaaaaacatgttcgattcactacaacttagaactttgttcagcataaatacaagcaacacaagtacacatagataaaaactttgagccgtgatattgagtcttgaggaaggagttaagattcagacctatgaagcagatgaagagggagaggcagctggagagggtgagataggatctgtggttgtctccttagctgaatgacattcgaggaaattgaggaaccgaggattattttcgcgaaaaacttctccactaaggacaagtgctcaagcttcttcttctgctcatctgcagctcgggaattctcaacatcacgcaaagcaatctcagattcacgcttctgattgtaagaaacctgctcttctatcttgcgttgagcttcaagtaattgttcttgcaaagccacaaaagaagttgagtcacctgcttgctttcgcttgccattgacaagagactctttgaggcttcctactccataagaaacgcctcttgaatccctctcacctataagattcacaaaatcttaaattccttaacattagcattaccatatgtagcaacttttttatgaaaatcttttaaattataacaaaagtcctttatgttttaagaaaataaaaattttaaaaataaaattatctaatatatttccatcaattctaattacttaaaaatatgagaaattttaggacattattaatattatactttattaaaagataaatattatagttatttaaactttattaaatcttttagaatatttataatatgtgaaatctttaaaaattaaataatcatttgaaagaaaactttaaattcatttcacttataaatccttaaataaaagtattattaaaacaaaaaataaaaaaataaaaatatttaatttcaatgaacaagactgtatggtaggtcaggtttataatattataatatataaaatttacaataattaaataaccatttgaaagaaaacttataaattgatttgaattaaatatttttaaaattaaagtattattaaaacaaaaaataacaaaataatgtctaattttactgaacaagattagatggtaggacgagtttggtcgatagtaatacaagacggtataccacagataaaatccattagatatgtctaatttccctgaataggattagatggtatgacgggtttggatctatagtaataccagacgatatactacgggtgaaatcctagatataacagttaaaatacaattacattatcttaaatactaaaaaataaacaatattaataaaaaaataatttaaattctatagttataatctgaattttaatttaatgaactgtatgttattgtttctatattttttaaagagaaaaaatcaaacatagtaaatgtatactaaaacaaaattgatataagagttgtacatttagaaaatccaaagcaataaatcatttatatttttaatctactaaacaaattaaattttgagttttttaaaaaatcaccgaacgggttaaaaccatatgtatttatttcataacggctaaatacatatactactcttacgacattccaaaagacctatatttttcacaaactatttagtctaaaatccaagtaaaaaaataatcaaattttacataatatagtttatcgtgcttttattagatacactatacatgttaaccgtaatcccaactaacatactaagaaaacacatattataatcgtaatcccacatacataatctattattcaattatacgaatttcactcaacatataaattttattaaaaaactagccccgcggtgtaccgcgagtcaaaatctagtatatactaaatatacaattatgtacacaaagggacacatcaattctttaataaattcaatagtatctattgttgatattagtataattagtaaaattattatattatgtatattaataacaatattagtttatttcataactgatattagtaaaaattattaagattgcattaactacaaccataacttactcaactatattttcattgttgtttatttaagagtaggaatttcattgtttttgaaacacctaattccaagatatgtctacaccaaatatacctgacgattttctagccaagatagccaaaacaatggctgacaaatgttggtggtacctcggacctctgttaagatcaggacattgtggaagaaacatagtctactggccagatgtcatgaaagatgctaatatttacagcatgtgcggtgatcccgatgacttccatgcggcagaccatgatccaaaggttgatatagaccctttttcaaaaggtgtctagaggctggttaaccgattgctatttaccatgaaggactttgtctagttacccatgagtctgacattaaggacgctatcgtacttttacagcaaaatataccaaggcacgccgatgcaaccttgaactgcgcaattctttgcattgttacggtaatgctcacatgggtggtgtgtaccttcggattttagcaagcaaacataatgcttttgaattagaagaaacacatgacatgtgtgaggagttgctaggagaaataaagaaatatggaattactgtaaaaaacacttacggcaaaaccttttcgtatcctgagtgtcgtggtattcgaacgcctccttgcgcgatgatgtgttacataagatttggacccttcaagaatctttgcaacaaatgttacctctggttgtgtgcaagaataattagccaaattatctagttatttctttcgtaacattcttttcaaatttataagtttttatgttataatatgtgggatttgagatttatactttgattatcagtaatgcatgtcttttatctatatatttgcttctttcctagtaattccatgtattatctcataattaaacgattctcacacttatttaatacctcctactataagaagaaacatcaaatcaataatatattaaacaaatgcattctcctaacctatacgtacatgggtatgatttattgtacacaatatttagttggtttcaaactgcaaatatgagaaacgagtttcgagatgttagtaaataatgatgtaaatttgattgatttgacatggaatgacccatatctacaagatttcgcttggttattaattacatactgtcaagcttaatttagccataatcttttcacataaatctccctaatagacgtacacggttttgaattaatgtacgcatgtcatttgtcagataagagaaaatctaaaagaatgagatttgtatattaaatgcattcccccctaatttagccatatacaataactcaatatttatcccctaatttaccgacagccatcaactcaaagttttgtcagaacacgtaatgagtatttcatatacgtacacgggttgtttatgatatgtacacatgtacttgttttaattaaaactactaatattatgcacttaatatcaacccaaaatgcccaaccacttacattcaagtcgttctctcctataaaacggtatcccacacacttttttattcataccacttcttcttaaacctcctccattaactccagcaaaacttgtaaacctccttggtacgcaccatgccttttccagctccagcaacccctccaaccgaaatgtacctagcaatataattgcaaaccctatttgtaacaccccgatttcagaaatatggtggttcatgcagagaggtttaaaagaattgatttggctacctaagagaactctacagttaagcgtgcttggactggagtagtttcaggatgggtgaccttccgggaagtgattgtcggaaccatgcgagtgggaacaaagcatggggaaagatcatgtggtgaattgtaggatcggtaacaagtctttaaagactctcacacgtggcgcaccgaccgtcggacaggggtgggccaatgggcccgagagaggacgtggggcccactggtagaggcggtcagggcgtaacactatttgcatcctcgtaaactaccttctcgtgagccagacccccatcgagacactttggaacatggtcaatgctggtgacatcaacgccatagcgatggacgagttcatgacttggccgcacttgcttcaaccagattatcccttccgtccatacttcgggctcctgctagataggggatcgattctgacgatatacctagaaggtgtttggcaagccaacaacttcatcaccgtcgcttaggctcttactctcgtcaattatgtctcaccatccgatcatatgcctgcttcgcgaataggttgttcctaacatgtactggtaaacatgtgcacttccttccaatcggcgatatgttctgagagatgacccccacagtcgaggcagctcatgcagtgggagagcttgtgatgtaccacataagccagcttcacaccgaaagacctcgtctctggcaacgttcatggaggtttgtgcacacacaagcatatgttggccgttgcacgtacagtcaaggctgcaaagggtgtttcttttactcgtacgcggggaaatgtatatcttctactagatatgacattgctatgacagatgaggcacacatattttctggctcatgtgtatgcttcggctttacttattagtttattgcttcagagtataatattgttgataatctacatatacatttttggggacgatttgtgtcgaaaaatcctttttcaatttcgatattgtatgtttagttcctacaaaatcaatcagacaagatattttctttaggacaatgaccaaatttttgattaacaattaagatattgcactaactacttgcctaaacatagatattgttaactactaccctaataaattgcacaaatcaatccctaaaactctacgaaattcgcaaaccattaattcctaattactaaatttgatactaaatcctaactaaccatatctataatcacttagattcgaaaatcattatagttttaaatgctaatgaaataataccaaaatttattcttctgttatcaattacaacaataaattcggtttgattagtaaatccaaaaatgtatatttacaaaacgattaacgctaaacaattgccattaaaactttccattattatcgataatatacattcattccgaaatatatgagaatttcaacaatttgattttatcaactaaccatatctacatttctatttatgtaaaataagcatatacttgactttaaggaatattagtgcctcacaatatcataatcttaccacatcaaattgtttcccaaatctttgccaatattctcggaacaatctttctaaaatatctcgacataactaattgctctacactacaaaatattcatacataagattttatagaaacttttaattattatgacaaatcgcatttacagcatatacctaaaatattctaattacgtatatttgattccattttagttaagatcgcgaattaattttgcttgctcaccaaaatattgacctaatcattccaagcctatatatactatatatgtttatctctcatcacattatcaagcacacacatcatgggcgttcatattgaccttctttatgaatatgatgtcaatgtattgatgttgatttctgtattaaagaacacaatacttgagaattgtgtatttcttttttctttttggtaacgagctgtgtattattgttccaaactatttagataatcatatatgaacgtttgtctgtacatatacgtgtgtttaattttgttgtatctttggttctgctttttaattttgtaaaggagtttatgtaagtaaaaaattaaatatacgtgtcaaggtgaagcgaaaagatggggagacgtacgtacaccaccggaagctgaagctaaagctcaactaaagtcaatgcatcaagtgtggtccgacggctatagatcaatttaccaaaaaatagagactttgaagtgtcttacggtggacttcattaccgaagccttacgcaaagatattcacttttgggcaaccaggtttacaaatatctttttctcttttactaaaatatcgtgtaatcagttagctcatttgttggcaaaaaaagagttggatagattctatgtttttttcggattgtttgagtcctccggtttagatttatgatctgttgtatcatgatcgaacctaataatctttactcaataaagttctttcgttgaaaaaaataaaataatagttaaacaaacgtgtatggtttagaactttaactataaaacagaacctaaaattactatgtttactttgatctaaaaataattattatatattaaattttattttaaaaatctaaagtacaaaaactaaatatttgccatgcgggttaaaacctgttgattttgatggatcaggtcaaaaacatattcatataaatatttagccataataaagctaaataatactatactttaaatataagagctacttcgaattaaaaatcatacacaataaattggttaattttatatacaacaaaatcatacgtttataaataacaaaatatttttaaaaaccgactgtcgtatattgcagatcaatctcagctagaatattgcactaattatttagattttaaattttaaatacaagatattatacagatttttaataatatttagtatatatggaacaaaaaaaacaaataattctttatttcacatacataccatttcctatacttttaaaattttcatactaaaatcctaaaataaaaaaaaaaacaatttttaaaatctgctacatcgttacttattgaactgtatattttcgtatctaaattttaaatattgaaacctaaataatactaatcatacactaaataatacatagatatatatctacatttaaataagacaaattactatgttatatcttcagcgaatcttcaaaaaaaaaaaacaaattaatatggtgttcaatttgacgggacatattatatggtagcaggggttggtcgatattaatacaagatgtataacatggatgaaatcgtagaataaacaatcaaaatataattatacgggaatataactaaaaaaaaaaaaagtttatacaactatacgggaaatggttatacggtaggacaggttttggtctatattaatatgagactgtatacagtgggtgaaattctagaattaacaatcaaaatacaatttacaaaaacaaacaaacaatattaataaaacaattacaacttaaattttgtcatacaaaaattaactcgcggtgtacaacggatcatatccatatctacatatacattttaggtagttataatacttttacttttaaccaaaaaagtattatataacaaacacataattatgtaccataaaatacacactccatataaatgatgtgtataataaacagatttttcttaaccaaacaacatcaaaccaaacaaatactaatataacatcaaaagtaaatagatataaaatgtaaaatgataaattcaaaatattacttgatattaaatatagataatattaaattaaaaataaaatttaatatctaacgcaaataatcaacccgcagtgtcaatatctagtgttttatattttactaatatcatgtatgtatattattttcaaattatctgtactataggtaaattatatatatctataaattaattcttattcaataaatattttatctaaaataaatgattaaaccgtattatttgctccaattttaccattcatacatattttggaccaccaattctgcttgatacgcttttgttccgctacaaccgctagatccgctctgctcgatacgctctctccatttgaagcctaaaagacaaaaaataaatatacatgtaattagtccacttttaattttattttgttgattggttagtcaaagacagttcatctgtcccacactttgtactgccaaagtgtggactaactatacaagtaaacatttacacacaaagaaagattaactatatttgtaatatatacaacagcaaaatttataaattaattaaagcatgaatccagtgcgaatcttgggtacagacctagtctaaaggtaaaggatagcactctaataaaaatattcgtttttctaataagtttagccggtgaatttagggacaactttttatgtaaaccataaacataaactaatttggaaggaacccaaattaaaagtttgtaaaagctaagtttggagaaaatatataatcaaagtatagtagtcaaagttaaaaatattattttctaaagcaaacattattaactagaaataatgttgttaatttaaaattacttaaacgaggaaaaacactaatttaaagcttctttttctaaagcttctttttctaaaactaacaataacattttaagtagaactatataaatttattttttttctcgtatagaaaatagaagaaagtggttgaaactgttgttttaagcctgtaacacattaatatgcatgaatatagaagaattgatttctttggattaaaaatttacgtgaaatagatgaattaaaatcccaagaaaaaactttttttttaatatgcaacactttacaaatattcattgcacaaatgtaacatcacatttcctaggctttgaatgttgcgtcagatatttgacagttcaaagtgtgggacaaatgaactgtctttgacttaccaatcgacaaaataaaataaaaagtggactaactacatgcaagggcggatctaggttggagggaggtggggcatgtgccctacactactttatagattttcgttcgtgaagacatcttataagaatgatttagcacaaatggtttagtgcttctactattacttcttccttacccaggtttgagacttgtcaaaggcatattctccttctaattaccttcattttcttccaccagaaacattattgtaattttttttttcatttaacttttgaacagtcactttaaaatttcgtttaaattactttaataattacttaaaatatgtctgcttatatatttttaataagtttgatatatatgaaaatgaataacaaaataatatatatataccttcatacatatttttgggcatctatatgtgagatataaataataagtattaagataaacattttttgtgttaaaatactacatattttatcacaaatttatattttaataatgactaatatatataataatttggataaatatatatgtataagtaaatgaatagtgccctacactaaatatttctctagatccgccactgactacatgcagatttattttttgtcttttaggcttcaaatggagagagggtatcgagtagagcagatcaagcggtcctggtgaatcgagtggagcagatcaagcggtcctggtgaatcaagtagaataaatgatgattaagcggttctagcggaacaaaagtgtatcaagcagaattggtggtccaaaatatatatgaatggtaaaagcggatcaaataatgcggatcaatcatttattttagctaaaatatttactaaataataattaatttccaaatctatatatttacctataatactagtaatttgaaaataatatacataaatgatattagtaaaattattaacgttgtgtttcacaactgaatactcaaatattatatatatatatatatcaattagggtgttgttcgtttgatcagttgactgatccatctagttgcagatgacaactgatgttcgtttggacacaatataatggaatagttggacgcatcagttggctgagtttataaaattcatccaaaaaaaatcaaaatattcagctgactttgatcggtgcatccagatgcatcagctgcagtcaaaaacaggaaatgactaaaatacccctttaaaatttgaagaattacccaaaaccattccttatcatctgacgattctcgacatctcttgacaaagaagagaaatagatttttagagttcttcacttcccattttctcttggatctcttgttctcgatttcagaaaagtgaagagtaaaatcaaaaatcgaaaactccaacctctacttagacaatttttctttctgggtcaagcttctattcaactcaaggctttctctactagtcatctcgatctctctttatactctgtttcttttgctcgaatctaaaataatttttgtagatttgcaagtttgttgtatctttattgctcgtttattcaattgggttttcttaatttgctgtgaaaaaaaaacccaaagattttggatttcttcttcctagccttggtttattcattagctgagatttaacgattatgggtttattcatgttttatgttttgcagatgtacaaaagttttaccatcagtgtgaccctcgtgagttatttcgtaaacccattttaagtcttgtatgtagctttcaagaggtattttttctttgggtaaagttaagatttatcactacaggagttactttcgagtcagaattagggtagattgtgattgaagttgcattttttgcttgatgagtttgttcactgattctttttgttcccagcttttttttcttctaatttctgtgatcgattgttttagttatcttcttcttgattagatccagtatgcaatagatttgttgttatgattctttttctagttgtctcctctattaggagttttatctctattaggagtattttggttttatgatttttttcacaaactctccgctagagagagccatattcaggaaccgatgtgcttacatgggaaaaaggctatttcgagcccgagcttttttagctaaacaatcagctcgagtattagaactacgaggaagaaatctaatacagaaagaagggaaaaaacaaactaaagatcgataggatgccaattccgctgcaaaagtcggctaatcgtcttgattgtcattgatagaaatcaggtctgaatagtcggaagcaaaagcgcaagaagtatcgccaatagagatcatgcattctattgtccatagcaaggaatcaaattctgcatgaagcggtgataagcttcgccgagcacttttgaggccaagatgaagaactaagtcttctcgaacaagggccgatccatgtccgcttaacgggtcttctgcatgccaagaggcatcaatttaacattcaggaaacaaggagagcgaaatctgagaaatatatctaggaaaggagttaagcatatgggtacatcttcttttagggttgcttgtttccaaacagctgcctccttgagtgccaaagccaaagtttcaaggggaggttctctaaagttctcaaacacaaaacgatttctacttttttagatataccaaattatccatggaaatactttcaacacctcctttccgattccaaattcatggccacgccagaaaaagaagtcgaaattatagaagagggaatttctagggaaaatattccctgaagaaggaataggcgatgatgcccaaatctgtcgcgaaggtggacaatgaaagagaagatggttaattgtctcttcagcttctccgcaacgggggcatcctttatccgtacccatatggcgatatgtcaatctttggcaagtggctagacagtccgagatacattgctacgcgaaatgcataagcttcagcgtagatttaagcttccatacttgtgcctgaagtgccgaaacacctgctccctgaaaaggggggtcacaagtaggacgagatagatctctcgcggcccaatatcctgacttaacggtatgattaccaaatttagtgtgagaccagctaaagccatcactcaagtaggtacggcttgggcgaatccctaaaatgagtggaatatcaacgagatcaaccaatgcttgaagacggtctaatttccacatctttgtattttggtcgattaaatcattgacatagagtaggggatctcttatgtcaagaatgctttttgtcggccgcgcagggatagtgggaatccatggatctttccatacgcgagtcagcattccagaacctatggtcctccgaagtcccgagacaagaaggggtttggtgccatgatacttctccatccaaaagacggacgatttgatgcgctgatatgtaatggatcactatatcgaaaatatctccccctcaagaccctactcaaaagagagtttgggaatcggataagacgccatagttgttttgccaaaagagctagattaaactcttccagtgatctaaaacctagtccaccttcagagtgtgggttgcaaagcttatcccatgcaatccagtggataccattactattctcattagtttttcaccagaaatttgcaatagcactactcaactttgagcgaatagccttagagagtaaaaaacacgatataacatatgtcggaagggcttgtgctactgactttataagaacctctttgcctcctttggacaagaatttggctgaccaggtattaagtctcttttggagtctatccctcacaaaggagaaaacttgggttttagagccatgaattttctcaagtaaacccaagtaagatcccatgcccccatcccggtggatacccaaggttgattttatggtactctgggtcgtattgtccacatcatgaccaaacattacagacgacttagcagcatttaactgttgtcctgatgcctcaccataaatgcggagaatattgatgatctcttgaccttgagctgggtcagctcgacaaaaaaataagatgtcatctgcaaacaagagatgcgaggtggaaggacttgcgcgtgagatttgaagaccttggatcctgccattccattcagcttctttgagtttcgctaccaaagctttcgtacacaaaataaagaggaacggggaaatatgatcgccttgtctaattccccttgatggtttgatgaaacctcttggagctccatttaagagtactttatatgagacatatgagatgcaaaagattatcaagtccacccatttctgagtgaaacccattttcaacatgagagctcgtagaaaagaccattccacacgatagtaagctttactcatatcagtctttatagccatgaactttttcctacaagccagtttgttcggagggcatgaaaattttcctgagctataagaatattatctgtgataagtctcccagccacaaaggcagactgagtctcagttttaactccagaagaatctttttcagacgagagctgagaacttttgaaattactttataactaacattacataggctgattggccagaattccgccatcttccttggtcgatctgtttttggaatcatgcaaatatttgtctcattcaaacgctcatcaaaagagctggatgaatggaagttttgaactactttaaccaggtctggcccggtcaaatcccaaaacctttgatagaaaagggctgtcataccatctggacccggaacttgatctggattaagcgaaaagagagcacgtttaacttcatccgtggaaatctctttaatgagtctctcattcattacgtccgagataatcaccggcacatcccgaagggcggaatgaaaatcttgtgggtctgaggttgtaaacaagtctttaaagtactccaccgctagacttttaattcccacctctttgtctacccatagtccatcttggttcagtaaaccaataatcttattccttgctcgtttttgcttggtaattgcatgaaagtattttgtatttttatcaccctctttaaaccaaagttcccgacactttaatcgccagaatatctcctcttctctataagcatcacaaagtttccatttcagagctaaaagttcttcggcagaaatagactcgtcttcctgagcaaggtcgatcttattttgaagatccaaaatcttcttctcagaatttgaggaattagatttcttccaaatagaaattgattttctacaatttctaactttttgtgaaaaaagaactccttcttgtgaagagacatcccaacctccaataactgattctttaaacccccgtttatcaagccatcttttatcaaaaataaaaggtttaaataatcgttgtggactattgtggattgatgctaggaggggtttgtgatcacaactccataattttaaatattccacattagtgtgggaaaagatagtatgccattcctcattcgccattgctctatctaatcttgagttaatgactttacggactctccgtcctgtaactccacaactacgtcgccccacccatgaaaaaaaattatcatgagatggcacctcaatcattccacaattttcaatcatacaacgaaatgggaggaaagaggattccgacctacttttaccacccttcttctcatgatttcctataatttcattaaagtcaccgatcataaaccatggatccgagcgtcaaatgccaatacaagtcaaacgctcccaaactaattctcggtactgaactaccgaatctccatatacaaaattaatataaactcggtttccatcaataatagtttcaatatcaagatgccgatcactaacaaaaacaaacttaaccggataatctttcgaatacataagggcaagaccactactggtgccaatcggttcaactatttgaaggaaatcaaaacctaaagacacttgcatattttgtagatgcatgtgattgctcttggtttctgataaaacaaacaaacatggggagtacattcgacacatctcctccagtcgacgagaggtaagatctgctcccaccccttgacaattccatgctaagattctcatgtgttagttccggagggagagtcaaaccccaccgtactaacaattgaaaaggtaattataatttttgcaaaaataatcacctcaatacaagggataattgaagatttgttaaaaactcttgtctttgctctcaacgaacattccaaagtaaaataacattgtaaacatgattttttcagatacaaagaatgtgagaatggtctctccttgacggaggaaatcaaaatacatggacctacatccagaaatttagaacttaaatttttagttgggtcagaaataaccttaaaattaattttactatgccaggcccaaagcttcaatacaacaaaggaaatggatgttgagccgctagcttcacatgcttgacttcgtcggagctgaaatgcattcggtgacggaacagtaaatactgttgaccagagacatgtcacggttaggtgagagatacaaatcaaagagcgagaggaatccaaagcatcgcgaaagtccatcaaaatcaaaagattcgacacgacatacattgtctctaaaatgagcaagatgtttagatctagcaactctaacaaagcggagtccacaaggtgggaagttggcttcattagagaagttagacgccatgatttcatcacacacgtgagagggattataaactctcgccagaaaacaaaaggctagcgaaaaaggagaagagtcaaaggcttcttctttaatcgaagagggtttcgttttgagggaaaaatctggtgagaaatggacacggttatccgtccttttcgagatgtttgagctctgactgttgctatggagaagatttcatgagagcttctccggtacttcgacgagattggatacattggaataataccagagagagagagaaagaggaaattcagatttcagatctggcttatacaaaggttcaagggagaagaagacatctaaaaaatgagatctaaggaaagaacttccgttctaagatctgatttgtcgaaaagcttccccaaaagaagataaaataaggaaacacggcaaaagccggaaaatattgtctgtgagttttgaaattagccacgacatgatgcagtccgaacgctacttgatagctcaaatccaattactttgccataggcgaccaccaagccctcccgaaataatcggtagatccaagaaataaagaaaaaataaataatttttttaacaattacttcgtcggaaaaagcagatgcggagagagaactaatacacggcgaaacgatgggcagatgcggtggaaaaagtcatcccgtagagttggtaaaaaggtctcgaaattcgtgcaaaagagaagtgttgacagacgagcaggtggagaagtacatagaacacataacaatcatgctcccgtaccttattagaaagcatgcagtaaatgggagaatgctcacacagagactggatcgaatgacaatgactagacccatcatacagtgcacatgttcttcattaggtatgtttgtgttccatttttcagtttcaataattgtggcgccaagtgattggtttaaacgtgtttctttcaggtcttgttggaatttcatgtgttatcttactagagctacattcagttaacgcactggagttttgtgggaaactagatgaggacatgatgcgagctgccgctaaacaatatgcaatcaaaactttcaatacattgtctccagaagaacgttctgcttgagtagtaccagtattatgcacgtcaaccaacccaagactctcttcttaagtcagttattctttgtatttaaatttcaccactcctggattaatgtgatatatacattgttgtactttgttggattttgtaatcatttgtgtatttttttataacagaagccaacctaaattctgcatcacttatgtgtcttgcaacgtccatttaacatttaatacatacaacaacgaggaaccaacttacaacaacagtactataaatagaaacgaaccacatgcacattgactacaacactaacatataaactagaacaatacacacacaagaaggttcttcatttcacgcaattccatcttgcaaccttgcagctcattctctaacctaatcaactccttctcaaacccggaaacaacagattcacatgttcgtgtatgaatggccagagtttccatctcacattctaaagattgtacctctttttgtaatgtcaatgaagatccttcaattttttcaatcttcggaagtatgtcttccatctcttccaccattgtttcatctgtccacctaaacaagtgaccacgaacattctgatgcataccaagtgaagaagtgagagatgttccgttaatgaacaatattaatagatcactataattacctccactccacatcgacaggcaaagaagagtctccctgggtttttgacagtctttgaggttctcaaaaccacatcttctccacaacaacatcgaattggaatccctctccctctatcttccattttcttttaactggacagtctcaatttggctatcgagaagtgaaggtatgaaccctaaatacagattacccccaaatcaaaacgacgacggttagtcgcgttgtgtaatgagtggtcaaaattaaatagcaagcatatggctaaatagaatagtatggacatatgtagactatttctctgcatctgtctatcaactttccaagtcagcatatagaatcagaaatgtaataaaccaaactaaacttacagaagttcatgaaccaatgaaattccatctacttagagaaatggtttagacaaaaaacttcataaaccatatcatttcaaacggactatttgttcatactttaccaaaactgagtgaatcgtttcattaacaaaccatatggattgtgtttcgtatgatttagcacagtagtgcttttaaatgcactagtttcataatcctgttcatataccgaattgcttgggttccttatgcagtattagggtttattttttgaattgcggaaataatttgttatcattaaatagagactattgtatgtgtatttgaggttcatttagaaatgagtgcttctttcaacaaggcaatataatgttttggtttgcttatgattttccccagtagtgatgttaaatgcaatagttacataatcaagttcgtaatcctatttgcttgggttccttagtcagtattagggtttagtttatgatttttgttcacaatttgagatcagtaaatgcgagaatacattagtttgtaaacaatttgggatcagtaaacttgcaacgaattataagacagaccaaataggcggggtttttaatatatacattgcaaaaacggtgttacagggcatttcctaattacattgggacgattaaaagcaacacaaatatacacgaattgcagggatcacataagtatcaaaagaagaaggtatacaccaaagtagacactcgcgcttccgcaaacattgtgggaacaaccgttatttagcccataccagaaagttatatcataacacctaatacccctcagtagcagtcgttgagttcttagatagcattacggcaggaggctttgttgtggcctgtgccacaacaacgtgaacacctcctctgtgaaccggtcttcttgcactgaaaagtagcagtatatcagctgtggtatttttaaaagtacacaaagtagaatggactatgatatattaacagttttaaacttgccttgaattcaccacgagacagaattctgagtttccttggtctccctggtggccgccgcactaatggtggatgcacctctcctatagtgcctgaagcaattccgggtgcgacctcgccaccaacagagtgaattggatagatttttccctcgtaacttagtttaactagctcattgaaatattcgtttgctgctaaagaatctgttggaactccaagccaagcagcagctgctattgcgtgagcacaaggtatccctaatccctgaaattctaaacaagaacacgtagactcgtccaatttgacaataaaacattcaccagtcctaacttgaacctggaactcaaagttgcaaatcggcttcacagacattgacatcgcggcttgatagttttcctcaactcgcttttgaactctcggagctaaagttgtagggcagtcttcagcttgagcccttttagaagcaaaccaatccatcaaggttgttcttatgtactcaagcatgcaaataagaggatactcgcgtgcctctcttataacgttgttccacgactcacatatgttactatccatgatattgaaacgccgaccttttgaatgtactcttgtccattctgaaaaccctacatcgaccaaaaagtaaagggttatgtaaacaactgaatccataaccattcaatatcaatatgttgaagctgaacaatattatgaagaaggaaacaaaattacccaaatcaactaaatatgcagcacatccgggtttaacttttgtatcttgagaaatatcctattgaactcagtgacatcaaacgcttgggcagcttcagacattagacggcaaaggcttttaggcttatacaaatgtttgacattacgccaaaggtgaacagtgcaagcagcatgattggcttgcgtgtatacctgattgaaatagtcaacaaatcagacattacttgtataatatataaaaggctgaatggaaactgttgtctttctcaccttgctcaatccagtgtagatgctagcatggcggtctgatatgaacattaaatccggattgtctggagctataatgctgagcttgtgaaaaaaccattcatatgcactatcattctcgctgttaacaatgccaaaagcaagtgggaagatctggaaattcccatcttgggaacatgctgatattagtcagccaccatatcggcccttcatagaggttccatcaacaacaatgaccttctgcataaatgcataacctttaatggatgctgcgaaggcaatgaattggtacttgaaacgtcgtggtccagttggatcatcatcatactctgtaaagcacagactgtctgggttcgcttgctcaagtaggccagcgtatgcggggattagtgcatagctgcctgccatagatcctaatgacttctccatggcaacctctctagcacgccaagctttcaagtatgatatactaacatggtagtcatcaagcaggaacttcctaataacagcagcatttggcccacgtttaataccgagaaatcgagattgcataagtttgcctatgacttgtgttgttgctaagcggtggtatctacgtctttgatcaatggtgcaggtgtgtctctgatttgcctgtcgtacttgaaagctgtcagaagaatctaccttagaagcatacacacgccatggacaagtcttagagatgcatttcaagaccataaactttggagttgatctcgcagttcggaagtgaaacttgcagttgatggcgtgtatagctatcttaatcttgcaatcaaacttggacttgaatactctgccaacaaacagcttgtctccttcatatttaacatcaaagaatgcagagtctacacttgaaacacaatgaccatcattcagcacatgtatgataaacgatactgaaatagaaccaatcattctacatagaatggtatagaaaacataaactacgtaaacgaactatcaacttccaatgcattcagataaatcagcaaagcatgtatatatttatagacggattgcaggatataccttcaccttttccatcattaaatactggtgggcgtctcgaccgaataggattggatcatcactgaaatcagatagtatggtgtttaatgcttcttgtgctcgaccccaaaaaagaatgttatgcctttgaattgcagtttcttccacaccatttgtagtaggagatacatgatggccagtcggagttccaaccgcggcccttgatgaatcaacaccttatgcattaacattttctggaatggcgatagctggcagattaggtagcattgtgaatgggactataagcaaatcatcgtcactgtcgctgtcttctgtcccactttgcctactaggaccagcaggccctgccttatcacttgtttccattatgcctttttctttgtctgtaggtccacatgccgggcttttaagacgaatgtagtcttcaggctctctaatagttacgcctcctgtagggaaaagttccctccttgtactacttcttgtagctggctctgttcctcccggagttgggtcttgcgttgcacccaccaaggcactttcaagtgcaaattggtgtagttcttcttcagagtcataatctgtctcctcactgttagaattgaagtcatggcacgcaacagcaaccggagaaactggcatggaatgttggacgacagtaacacagagattgacctcttcaatatgacgtctcactgtcacatcaccgtcttcactgatgtattgaggaggagacccgttttcttcatcgattgccatccactctggatattggtaagccaattttatagttatgtctcttgcatggaaagaaagcttctccttaaccttctgaactagctccttgtaagtcatgttggtccggaggcgtatgtaagacgatccttccaaagtgttcggttcaaactgccagaccatattatcaactctcacccactcgccaattaccagcaagacctcatcttgtgatgccgtctacattgagtatgtgaagaggtaattagtttacagataaaagaaagaacgagtaaatataaacctagccaaatattctgatcgttcatatagcagtaagtttagtctttaactatggtaagtaataattgtcaaatattcagaaatggttactcatgtttgattctaagaaaatattaccaacttgtttatcagatctaagatcacggaaagtatttgattcgaaaagggaaagtacgttgtttgactttgaaagggttgaatattaaaaggaatctgcaaaaagtaaaaacagaaactggaaagcgatggttttataccttttccgttggattctccttattaactgctattttcaccaccatccatactgttctgtttacagttagagatctctgcgcaaaaggtatagcattaactgttattaaatagaaagctgagcatattctcctctgatatttttggggggagtattttgttcaaactaatcttatacactgcaggttatattatggatgggacaattctgaagcggtgctatagaatattttttacaggcttttccagcgcccacgtcagctgaaagaattaatcttctatttcccctcacgcgcgtttcagaaataacccaccattgtgttagggattggcttgtaacttcacacacctgatgtgttactctctgaattcggcaacttatggtgctagatatgtaatatctttccaggatttggttacttagctaattcacccaaaaatatattcccgccaaaaaaaaaaatttctgccaaatttttttcgtaacaaattttttgacagcaaaaaagatgcttttagaaattcttgtaacttttttttggcgggaaatagatttacaagagattttaaaaaggttttaaaagatgtacaagtgattttaaaagggtttaaaaagatttacaagggattttaaaagggttttaaaaaatttacaagagattttaaaaggttttaaaaagatttacaagagttttaaagggtcttcttgtaaattatttataaatcttttaaaaatccttgtacatcttttaaaaccctttcaaaccctttaaaaatctcttgtaaatcttttaaaacccttttaaaatcccttgtaaatctttcaaaacactttaaaccctttaaaaaaatcttttaaaaaactttgtaaatcttttaaatccctttaaaatcccttgtaaatcttttaaaacccttttcaaatcccttgtaaatgttttaaaacccttttagaacaattttaaaccctttaaaaatctttaaaaaccctttgtaaatcttttaactgaaaattacctagtttgacacaaatttggcataaaatggctagaatgacattcaaaaatctaattatactagattaacacaattatatggtaaaatgacaaaaatgcctttttaaaaaaccttttgaccaaaagaaaaagaaaaagaacagaaacaaataatacaggaaaaaaaaaaaggccacgttttaaaaacaaaaccctactcacgttatgtgttcacatttaatgattttcatgtcaaatatggtaactgatttacataagtcagccatcacataaaatcaaaattacaaatctaccataacataaaaatatgttaaatgtcattccacatacgaacggtccagtgggtcttagcttttcctcacggtcaatataaattgtggccgtcgtgtttcttcccgtcgtctcaattcagacatcacggtgagtggtcttgttcgaatctatttcagaaagttctcttccaaattttaaaccaattcgattataagttgttttaatcatttgtgcctctaatttgttatttcatgttttctttggtggcattagtaaaggcgtcttcaagaactgaccccaaatatccttctcggctctatgaagaaggaaattctcttttgcaacataggagcatgaatcactattgctttgtccaaaattgggagtacgaagaaaggtttagggttgaatgcttgggatgaattgaagaaatcatgccttggagtgttcataaagtttgatgagcatcatgcctagtgatatcccaacaataatttctctgcaagataaatatggtaactgattttagtaaatatgtcataacaagctaaaatgaaataaaaatctgttacaaaagttagtactattctattacaaaaaatcatggaaaaagaaaactataaatcggtcaccatatggattttaaattataaatctgtcgtaacataaaatatctttaaggtcattcccgcaatttattttgttctttataaaacctgccatcaaatgacagatttatggtaaaataaatttatctgtcacaacacaaaacattatattttagaaaacaaatctgccatcaaacgacaaatattgtgtaatattacaaaaatctgttataacataaaacaaatatgtcataacattaaaaaaatcagttatcgttagacgtcattctagtaattaattttttgacaacaaatctgttacaacgtgacagattttcttaacaaaattataaatctgccatgacttaccgtaaaaaaacatccacaaaaaaataagtctgtcaaattatatgaaagtctatggtcgcataaactaaaaacctgtcaattaaattaaatctgctataatttataaatctgtcatcactatcttctaaaaagtctatcaatcaaataagtctgtcataaaaaatctatcgcagttaaaaatgtctgcggaaaaaaaagaatccgccataactaaacgatagacttttgtaaaaacgcttgaatttttttaaaggatatttttgtatttattttatttttaacacataagaaaagggtattttagacaagaaaagaactaatttaaccccaatattttataagacattctagtaattaatctcactatttgggttaatctcgttttttcccatcttttaaagccctttaaaatctgttgaatggcaactataaaagctgtccaaaagaaaagcagttgtcaaacttcatccgcttgcagtattcaacacacctcttcaatagtgtttctttgatctgcttgtgtacaaaaattttcttcacatatttgatgtccttatggttcaaatttaggctttgaatgttggatcagatgtttggtaatctaaggtgtgagatagataaattgtctttatcttcccaatcagcaaaaataaaataaaaagtgggttaactgcatgcaaattttatttttgtcttttagtaataaaagcaggccaaaaataacagttctctctaataccttagtggaactcgtccaacaccagtccatacttttctaataaataaaaaccgaaaattgaaatacaattctcttttgtacttcatgcattacactcaatttacaaaaaatgtatctatctttctctccctcttacttcttttgaacgttgttttttttcttttttagaatgaaactttttttttaacaaaactataaataaatatgatttgcaatatcatgggcaaatcaaaatatttttcattaagttaatttgtttttgcttatttgttatcttcttcttcactctcatgtgttttatttggattttgtgtttaatattttaaaattatttaatagattaatatttttagtatatatgatttatttatacatactataatatattataaaattatataaaacaaaattaacaataaactaaaatattttgaattataataataacagtattacaatataaaattatagtttatatatatattttagtaaagtttatagaatagtttataacaatagatagtttttaattatcttttttattatttattatttaataatttgatctgcacatattgaaccgttttcaccattcgatctgcttgatctacatgatctgcacttgtcctacatgatctgcatattctgtatatgtcctacatgatctgcaacgcttgaactacttttaccattccaaactataatttctctccaaaacattatagtgtggatttgacttgtataccccaaccgaaatccaatttttacagtcaaaacctggatttattcgacccacatccgacccatctctcccaaacggatatttctctagatctattcggtttttctctttcaaaactgaaacttcaagtttcgaaactgtaaactttttgatttcttttccaaacgcctctctctcaatcttctccgttttcttctcaacattctcaacaagaaccctaatctctcttctcaacattccgagtctcaccctaaccctaactgtacccatagagaattctaatgccgcctctaaagaagaaaattaggttaaagaggaggagaggagtaggaacgacggaggagccgacaacaaagccaatcgatgggggaacgatggaggagccgacaacgacagaggagccatcatcgacggagcaaaatccaaaattgagggaggaggagttgaagaacaatcccgaccatcagtccggttttagaggcaatggaagaagggaagtctgacaagaatgaggaagaagagagtgaagaaaatcaagctttcaactcggttctatattcacgaagtgttgactacattagataagttgcagcctgcaatgagcaagtctgagagggcatggtttgagaaccatctgagtttccaacacatcttccacatgccaagagacccaaaccaccgacttatgggtatgtggatgctccttcttcgcacggcgcacattaaaaggaagaaagaaccgtggttcatcgtcaatggcgtttcaatccgatatggtatatcggaacacgcattgatatcgggcttcaattgcaagaactatggatttatacacttgggtataaaaatcagggaaaacttggatttcaagaagaagcatttcaagaatattgttgtgaaacacgaagacgtgagagagaagctcataggaatggtaccgttgggtgaaagatcaaaagaaaggttgaggatgatggttttgtatttcttaagcaacattatcatagcgcctatcaagaccggggataaggcacctcaagtggatgaattttgcctcaaggctgtgagtgatctcacattttgtaggaattttcagtgggggaggtattctttcgattacatgttaggaaacatctcacacccagtgaatcattttaatggttcagtcaccaacaacgaaaagtacatatggccagttccgggtttctttctttcgatggaggttagttacaacttatattaataggtgattgttagcaatactggtaatactgtggaatactatttgttattaaaaattcttttcttattctttagcttcttgcattcgaggcaatcccacaattgagaaaaaaaattattgaggaaattgcaggaccagatcagggatgtcctaggatgtgcaaggtgaggttcaagaagagaaggaccaaaagaagaatggtgatccgaatgagaaggatggtaatcaagagaaagatggtgatcaagaggaggatagtgtcccgaaagagaaggatcaagagaaagatggtgtcccaaaagagaatgacccgaaacagaaggatggtgatccttcgaaacccgtggaagcaaaattcacaaagaggaccattcagagtaccaagatttgaatctttttgttttgtttagatttaaatttttggaatgttattttaggatttgaatttggtttgttttgttcggatttgactcccggtttgttatgttaggatttgaatttggtttgtttttttggatttgaatttggatatgaatttgaatttgatatgttaggatttaaattggaattttatatgttaggattaaagataatactgggaatagaagggtatactaggatttaacgataatactgagaatacaagagaatactagaattaaacgataatactgaaaatacaaggaaatactaggatttaacgataatactggaaatacaaggaaatagttgataaagataataatgggaatacaagggaatactcaataaaagtcttacaaaacaaaggcagaaattaagctcacacaaaccaataattcctcattctccacaacaaactctccacaaagtccccatcttttattggatcctatccaactccgaacgcattttttggttagagcactccaagctttgaatctttttgtgatggttatcaacttgctctctcaacctattcacctcttctaccatagctttatcccaaagttttcgaatgtgtaacccatcattctacaaaacatgaattc

SEQ ID NO: 180 - DNA, 22852 bp, Arabidopsis thaliana
ttataacataaaacaaatatgtcataacattaaaaaaatcagttatcgttagacgtcattctagtaattaattttttgacaacaaatctgttacaacgtgacagattttcttaacaaaattataaatctgccatgacttaccgtaaaaaaacatccacaaaaaaataagtctgtcaaattatatgaaagtctatggtcgcataaactaaaaacctgtcaattaaattaaatctgctataatttataaatctgtcatcactatcttctaaaaagtctatcaatcaaataagtctgtcataaaaaatctatcgcagttaaaaatgtctgcggaaaaaaaagaatccgccataactaaacgatagacttttgtaaaaacgcttgaatttttttaaaggatatttttgtatttattttatttttaacacataagaaaagggtattttagacaagaaaagaactaatttaaccccaatattttataagacattctagtaattaatctcactatttgggttaatctcgttttttcccatcttttaaagccctttaaaatctgttgaatggcaactataaaagctgtccaaaagaaaagcagttgtcaaacttcatccgcttgcagtattcaacacacctcttcaatagtgtttctttgatctgcttgtgtacaaaaattttcttcacatatttgatgtccttatggttcaaatttaggctttgaatgttggatcagatgtttggtaatctaaggtgtgagatagataaattgtctttatcttcccaatcagcaaaaataaaataaaaagtgggttaactgcatgcaaattttatttttgtcttttagtaataaaagcaggccaaaaataacagttctctctaataccttagtggaactcgtccaacaccagtccatacttttctaataaataaaaaccgaaaattgaaatacaattctcttttgtacttcatgcattacactcaatttacaaaaaatgtatctatctttctctccctcttacttcttttgaacgttgttttttttcttttttagaatgaaactttttttttaacaaaactataaataaatatgatttgcaatatcatgggcaaatcaaaatatttttcattaagttaatttgtttttgcttatttgttatcttcttcttcactctcatgtgttttatttggattttgtgtttaatattttaaaattatttaatagattaatatttttagtatatatgatttatttatacatactataatatattataaaattatataaaacaaaattaacaataaactaaaatattttgaattataataataacagtattacaatataaaattatagtttatatatatattttagtaaagtttatagaatagtttataacaatagatagtttttaattatcttttttattatttattatttaataatttgatctgcacatattgaaccgttttcaccattcgatctgcttgatctacatgatctgcacttgtcctacatgatctgcatattctgtatatgtcctacatgatctgcaacgcttgaactacttttaccattccaaactataatttctctccaaaacattatagtgtggatttgacttgtataccccaaccgaaatccaatttttacagtcaaaacctggatttattcgacccacatccgacccatctctcccaaacggatatttctctagatctattcggtttttctctttcaaaactgaaacttcaagtttcgaaactgtaaactttttgatttcttttccaaacgcctctctctcaatcttctccgttttcttctcaacattctcaacaagaaccctaatctctcttctcaacattccgagtctcaccctaaccctaactgtacccatagagaattctaatgccgcctctaaagaagaaaattaggttaaagaggaggagaggagtaggaacgacggaggagccgacaacaaagccaatcgatgggggaacgatggaggagccgacaacgacagaggagccatcatcgacggagcaaaatccaaaattgagggaggaggagttgaagaacaatcccgaccatcagtccggttttagaggcaatggaagaagggaagtctgacaagaatgaggaagaagagagtgaagaaaatcaagctttcaactcggttctatattcacgaagtgttgactacattagataagttgcagcctgcaatgagcaagtctgagagggcatggtttgagaaccatctgagtttccaacacatcttccacatgccaagagacccaaaccaccgacttatgggtatgtggatgctccttcttcgcacggcgcacattaaaaggaagaaagaaccgtggttcatcgtcaatggcgtttcaatccgatatggtatatcggaacacgcattgatatcgggcttcaattgcaagaactatggatttatacacttgggtataaaaatcagggaaaacttggatttcaagaagaagcatttcaagaatattgttgtgaaacacgaagacgtgagagagaagctcataggaatggtaccgttgggtgaaagatcaaaagaaaggttgaggatgatggttttgtatttcttaagcaacattatcatagcgcctatcaagaccggggataaggcacctcaagtggatgaattttgcctcaaggctgtgagtgatctcacattttgtaggaattttcagtgggggaggtattctttcgattacatgttaggaaacatctcacacccagtgaatcattttaatggttcagtcaccaacaacgaaaagtacatatggccagttccgggtttctttctttcgatggaggttagttacaacttatattaataggtgattgttagcaatactggtaatactgtggaatactatttgttattaaaaattcttttcttattctttagcttcttgcattcgaggcaatcccacaattgagaaaaaaaattattgaggaaattgcaggaccagatcagggatgtcctaggatgtgcaaggtgaggttcaagaagagaaggaccaaaagaagaatggtgatccgaatgagaaggatggtaatcaagagaaagatggtgatcaagaggaggatagtgtcccgaaagagaaggatcaagagaaagatggtgtcccaaaagagaatgacccgaaacagaaggatggtgatccttcgaaacccgtggaagcaaaattcacaaagaggaccattcagagtaccaagatttgaatctttttgttttgtttagatttaaatttttggaatgttattttaggatttgaatttggtttgttttgttcggatttgactcccggtttgttatgttaggatttgaatttggtttgtttttttggatttgaatttggatatgaatttgaatttgatatgttaggatttaaattggaattttatatgttaggattaaagataatactgggaatagaagggtatactaggatttaacgataatactgagaatacaagagaatactagaattaaacgataatactgaaaatacaaggaaatactaggatttaacgataatactggaaatacaaggaaatagttgataaagataataatgggaatacaagggaatactcaataaaagtcttacaaaacaaaggcagaaattaagctcacacaaaccaataattcctcattctccacaacaaactctccacaaagtccccatcttttattggatcctatccaactccgaacgcattttttggttagagcactccaagctttgaatctttttgtgatggttatcaacttgctctctcaacctattcacctcttctaccatagctttatcccaaagttttcgaatgtgtaacccatcattctacaaaacatgaattctatatagaaatcaattattctaaaacaagattgatgatatctatatcttcaatttaccttataaacggtgcattcatagtatctttttcctttgtcaccaacgttctcagagattatgtcaatgtgcgccgttttttaaaagttagttgtactctagttttaggttgtacaaaatgtccacatagttttatttttggtgttttccagtttatgcagtattacatatccttcaaaaatgatttatttagttgttcagttgagggaagtctatcagtattgaattctaaagggttaacgtaattatatgtagacaatatatgaaattgtaaaatttcaatcctaagttggagtttatatcaaaagtgagcttaaaagtataaggaatatgtagaatatagtctactaacatgtattttgaccaaatatttttttccttaatttaattcgttttaattcatttgtaagagttcattatctttacatagtctatgtaatatttggtgttagaaaaaaacataaattcgaataataatatccttcaatagttatactagtattaccagtattgcattatttattcatttgttatactagtattatcaggattgcataattctttcatcagttatactagtatgacccttatgccagcgaattaaaatatagtattactgaaggaaagtttagtgttacatagttgcacaacgcgaataaagtttacaaatcataaaatcaaatactatgggtgccaaataacaaccattgcagcgcctgcctcggcctccttttgttagagtcctttgacgttttggatgtctttctctggtggatagaaacctaagcacttttgttctacccttcttctttttccgaggcagatgtaataccttcaatgctttgatgtcatctgggatatcccactgtgatataaccggagcatcaccttggctacaccgttgtgtaaacgaaaccagctagggtagctagtccagtctctccgggtccttcgatccccatgaggcctgttgcatctcgtcaagcaaacctcatgaaagaatggaatctcaagcaaggccagctacatcccacttgatagtagcatgcttatggatcgacttggataactttcacaattaagggacgagttgtgacgatgaagagcagaaaaatttagtgatgaactaatttcataccagagatgctttttaaggtcaaaattggggccttgatttcgatttcccaatgagacaaaaaagaactaaatctagaacatagaacctaaacaaatctcaccaaatagcaattaagggactgtaaccgaaaaacaaaaacaagcaaaaagctcgacatcgggacttcactcggcggagagagagagagagagagagagagagagagagagagagagagagagagagagagagtgtgttatagggaagagcgtgtaactcacacacacaaaaaaattaagaatattgcacaaaagaatatcacccttcttttttttgggtgttactttcttaattataggctgtaattggtaattctaatgcgatgatacaggaaatttgtcaatcaattttttttgcataattgcattagataacgcaaaaaagcatgattttgcatttttgcttaaacttactctagatatgctaaatataagcaatgtttaaggaaaaaaatataattgtttacacgaaaattgtatcattaataatataaaaacattttcaccattttgtaataaattttaataatctcatattttcatgggagatttgcaaaactgcccttattctaataaccttttgtaaaaatgccctttcctgaaggccatttttaaaactaccccttctaatatggcaaatgactgtcttaccctctgaatgattaggtttcacattcgtttcacaaacttcttcgttttggcacaaacttcttcgttttcctctccgattttcctctccgatttcactcaaaatcgccggtgaatttcctctccgatttcactcaaaatcgccgacgaatttcctctccgatttcactcaaaatcgccaacgaatttcctctccgattttactcaaaatcgccgacgaattttctctctgagaaaccccaaaatcgccgacgaatttcctctccgataaacctgttcttcgctgaaggattcagatcatttctctacgacgcaaacaatccccagagatatcgatagatccgacggtaaccgtttttataatcgattttatagtcgattttatagtcgattttatagtagatctgacgctgtttcataacatgttttgcagatggattcagagagtgaaatccttacattgcctgaacaaatctacagagaaggtgaggaatctattgcactgggaaccgttcaacaatactcggattggaatttagttagtaaagtagaggaagctttaggcgagtgtttatttcagaagattagaagttcgtttcttggtcctctagttgaattgggaccaaaaatgaaggctaagaagggaatcagattttctggaaaaatctttcactatctcatgcagcagagagtgaaaacaaaaggatcaactctttggtttagagttgattctcaacctatccgtttctccttgagagagttctatctcacaacaggtaataaagttttacaatcgtttttaaagcttaattaactgtcgtagaatgatttacaaggcatttgcataactgtttgcgtagtttacaatcgtttttaaaacataagtaagagtcatagataatttacaagggattttaaaagcttttaaaaggggtttacttcattaacaatcgtttaagaagcataagttagtggcagataatgatttacaagggattttagaaagggtatgcatggtttacaaccgtttttaggcataagtaactagcatagaataatttacaagggattttaaaagcttaaagaagtgttaaacacgtttacaagggattttaaaagcataagtaagtgtcttaaaacgatttacaagggattttagaagtgtttgcatagtttacaatcgattttaaaacataagtaaatggcatagaatatttacaagggattttaaaaccttttctaagggttaaacatgattagcaatcgttttttaagcataagtaagttgaatagaatgatttacaagggattttaaaagcttttagaagggttaaacatgatttacaatcgtttttaaagcataagtaagtgtcatataatgatttacaagggattttaaaagtgtctgcatggtttacaatcgtttttaaagcataagtaagtggcattgaatgatttataagggattttaaaagcttttaaaagtgttaaacatgatttacaatcgtttttaaagtattcactataaaacctgtaataatagtctctacactgtcttttgttcatacaggaattcaatgtgaacctgttcatagggaacttcgacgaaaggggaaagatcctgtaaaagaaccatacttttgggctagtaaaggatcctatactcttggtgatctcgaagatcgattgtttttaaaacctaaggaaggtgaacctgcttttgaagatgaagaaaagttgtgtcttgctgcagtagtgttgactgaaggaattcttttgacaccatatgcaaaagagaagatacctttgccaagattgcagcatgcttctgattttgagatgtacataacccaaccgtggggtaaagaagcattcagtgttctatcaaattcaattctgagaatggacgagaaaacttgggcaaaagagaaatatgatttgagaggatttggactagcgctaacaatatgggtgttgagcgcagttccagcatttggtgcagcatatggagttaaagataaggaattccaatctgaatatccattgatattgaagtggaaaagcactactactccagagtttttcaagatcgtaaaccttgtaaatgatgtttctgaagtaagcttttctctatttacagaattctttaaatggtttttagatttgaagttctgctttctcaagatttgtaatgttattgtatcttcgcagatggaggtgaatacaattattggaaacccagaagaattcaagtctttagttcctgatttccacacagacgacacagaattccaacatattttgggacttgttaatatgggctacagattgaagaaaactgaatggaatacaagatgcgttgatgtttgtgctgcccttgaagaagtaggtcaaaacaaaatcaataacaaaatatctgatagcgagaagcttgacaggattttgacaatccttgaagatcttaacaagagagtcgagctgattgagaggattttggacattagaatggaggaaaagaataatcagagatctgaggaagatgaagaaagaaaacaagaagatgaaggagtagaaagacaaccagaggtaattgtaaatgtttctttaaaagctatttgaaaggaaaggttttacaatgtattttaaaggttaaatacgtagtaaacctttacaatgtactctttttttttgcaggctgaagaagaaggaggactagaaagaaaagcagaggtaattgaaaatctttacaagctattttaaaggtctactaattatattaatgattgacttattgtttttattttgttgcataatgacaatgaatcatttgaagattcaatccgagagccaaacacacagtatgggagctatccgggtgatgatgaaaacacccaaagtgatgttggtgatgaagtagctgaagaatcatcaaaagtacagtaatttatatctttaaaagtcttacaaaaatgattagtatcctttttataattttacattgtgttatcttttcaaggataagtctcctactccacgatccactacaccaaatttcaatattttgtctgaagaaagtctggatgttcaaaaggataagaagagagttagcagaggaagaaatgaggttagaatttaaaaaaatttgtattatctaaccaagtgtttataatatttttttcaaatctttaaaagtttatctttcatgcaacttcagaacaagagagttaaaccaagtgttcatgctgaggataatcttaaaacaagaaaacaggttagtatttgcaacagtactgtttttaaaatttgtcaattgtcttgttatgatatttacaagggattttaaaagtacttttaattggtgttttactattctaggtgccgagaaagaggcagaaacaagttgatagtgctgatgttgatgttccaacaaggaaataggttagtatctaatttattatgattttgaaaattttgtttacaaggtattttaaacatctgtttttttttattctttttgataggcacagagtaagaaaaggaaaattattggcaatgatggtgataacgctgataatgatggcgacaatgatgattttcagcccgctccgcaaagaaagagtaagcggggtacggttccttccattcatacccaagcacctttcacagctgagaagaagaagcatccaattttgcatccatttgcgaaagttgatgccacaagacttgagaaattggctgaatggaagaagtcaaggaaaaacaagtgagttttgttagtaagatagtgagtttttttaataatggaagaagcatcattgttgactgttttgttgttgtaggccactatcaatcgcgggaaatattgtagatacaaagtggtttacaaccctagagacgccagggaaagcaataacagcaacggtatgtctaaaaatccttgtaaaattggtaacccatgaattacatatagtttttaaagcatcattaagttatttacaaaagggattttaaaaagggttacatggtttataaacaattttaaaagattagaaagtggtaaagaatgatttacaaggtattttaaaaaggatttacatgacttgcaatcgtttttaacggattagaaagtggtaaggattgacttacaagggattttaaaagctattaaaaagggtttaattgattaacaattgttttagaagcagaacttagtggcatagaatgatttacaagggattttaaaagcttttaaaagtggttaacttgatttacaatcgttaaaaagcataagtatgtggcgtagaatgatttacaaggtattttaaaaagggtttgcattttttacaatcgtttttaaaggggttttctaatatgataatttttatttttgttgtgtttagcatgttgatgcagctttggagttgatgaaaacgaggaaggaaagcaatccagaattattcaaaaacaaatcagttgtatttgttggatcgtctttcttaaatgtgattgatgagtcatacatggagtttttggataacaaagagggatttcagtttcagtctgaagaaatcagtaagctgataatagaggaagaaaccaagtgcatattggctcctttctgtatcaaaggaaaatgctgggttgccttgctcatccacttggaacagaagacagtttgtatatgggaatgtgcagcttcttatttaacagaagaagtcaagaaaaaatatgttgctgcctactctatagctatgccatacattgttcggaacatcctcaaaaaagaagacatggatgtctctccatttagcatcaaagtcctgaccacttttcctcaggtaacttctttaaatatatcatagtcttagaaatgaacattccgtaagtcctgacttctataacttctttgcttaagtaattcttttggtttttggttgtaggctcctagaaatgaagagtctcgtatctatatgctgaagtttatggaatgctactcaatgtataccagccattcaaaccttgaagggaacataattcaaaacgttatgaataaattggctgctgacatcttcaccgaattagggtcagtcactttgtagaagtagcagacttctaatcaaaaagtagtggagtataagatagatttatcagcttttgtttcttatttcataaaactttgtcatttgaatattttatgaacatctgtatggaacaagatttatgaagtttatttagttcaactcctgttttacaaaattactgtataatggttgtttgggttaacaggtgctttgatttgaatggaaaaggactttaaacatgcttttaaacagggtttttaaacgatttacaagctgctttataaggaatttaaaagtgttgaaaaagctgcagtagcggttattatgaaaaaaatttacaatcgtttttaaaatgatttacaaccgtttttaaaagagatttacaaacgatttataagctgttttaaaagcgttttaaaagtgttgaaaaagctgcagtaactgttattatgaaaagatttaccaccgtttttaaaatgatttacaaccgtttttaaaagataatttcaaccgttgaaaaagttacagtaatgttaaacactgtatctgttactaattgggcctaggcctgttatttagaaaaacaaactgttttagtttaaaaaacactaaaagcccaaaaaacactaaagcccaaaaattcactataacctaaaaacaaattaaacagggattggctgctgacatcttcaccgaattagggtcagtcactttgtagaagtagcagacttctaatcaaaaagtagtggagtacaagatagatttataaactttgtcatttgaatattttatgaacatctatatggaacaagatttatgaagtttatttagttcaactcctattttacaaaattactgtataatggttgtttgggttaacaggtgctttgatttgaatggaaaaggactttaaacatgcttttaaacagggtttttaaatgaattataagctgttttaaaagcgttttaaaagtgttgaaaaagctgcagtagctgctattatgaaaagatttacaatcgtttttaaaatgatttacaaccgtttttaaaagagaatatcaaccgttgaaaaagttacagtaatgttaaacactgtatttgttactaattgggcctaggcctgttatttagaaaaacaaactgttttagtaaaaaaaaacactaaaagcccaaaaaacactaaagcccaaaaattcactataacctaaaaacaaattaaacagggattggcttctgacatcttcaccgaattagggtcagtcactttgaaaagatttacaaccgattttaaaatgatttacaaccgtttttaaaagagaatatcaaccgttgaaaaagttacagtaatgttaaacactgtatctgttactaattgggcctaggcctgttatttagaaaaacaaactattttagtaaaaaaacattaaaagcccaaaaaacactaaagcccaaaaattcactataacccaaaaacaaaaaaagaagggaaccgtgaaaagacaacaaaaaagtaaccaaaaaaaaaaaaaaaaaagaatacaaattgtcgtcctcgtcttcttcctttcaacaatctgaagaaaatctgattatccagcaaaaaggaagcaattgaaggtaactaatttacgaaactgaagtttaacatttgggtttgttcgatttttgccgaatctcttttttgttctagcatttctaggtttttcggttgaaaacgaaacaagtaaaatagattgatatttgggaattttgaaggagtgttggaaattgttatataattttgatagatttatgttttaaagtttgatatttgggtttcaaaaaccttcaaagaagatttcaaatgccgattaacttctctgttgtagcaatttcaaagttttttcgttttgaaacttcaacagtaaatagattgatgtttgggtttgtgttttaatttatagatcctcacttaatttatgggttaccagttgattggatttggtttggaaaaggtttttttgtttctattttcagcggctgtgttctttgaaaaggattaaaattttgtttttggaatggtttcaaaacggtctttaaaaaggattatggagtaatgactgtgttttacaagggtttttaaagtcttaaaacgacttgtaatgactttgaaaaatggttttacaagggtttttaaagttctttaaacgacttgtaatgactatgtttatgtttcgaaaactacaaatgcataatggatttacaaaaatggtttttaaaaccatttcaaaactgtgttaatttaatgactgtgttaatgtatttaataaggttttgagaaatatgagtacaaagaaactgttcttccctaaaagactgttccaaccaggcagcgaagtagataatattacaagggtatcaaagcattcatctttcaaaattgtctcgactgtcaggaaagctttagagccgatagagttcaacacattaatggacacattcttgggtcctatagtggaattcgctgaaatggacttagcattttcaagccatatcgttcatcatttactccagagaagaatactaaccaacaatgacgaattgtggtttgtatttgctgatcaacctatgcgattctccctgagagagtttatcataacaacaggacttccaatggatgatgcatcaggaagcagtccaaatgtgaagagaaagaagaaagaaaagtggtggataaaagataatcagactttgaagggaaagcagaaaaaagatgtgtggattaacctcgaaatgacttttttagatcttacatatgttttggaaaagcgttccaaaaaaatgcagccagaggagagactgagattggcgggttcgttaccagtggagggcatattgctagctcgaaatccgactaccatgctgccaattgagaatctgaagagagctactgatttcgaaaagttctgtaagtatccatgggcgcagattgtgtactcatatttggtaactgaagtgaagagaatcggtaatgactatttgttaaggaaacaatatggtctatttggatttgttcaatcaattcagatatgggcattatcatcggttcagaagttgggagaaaagtttggcactagagatgaatcatctagtggaaatattccattaattctccaatggagatcaacatcgtctccaagtgcaaaagctataacaatgatagcagatggtgacaaggtacattttcttagctgtggcttttttttatgttttaaacactgtttataaataaagagtatgttttacaatagtttttacaatcaagttttaaagatttacaaagggttaaaagcaatttaaactatttacaacggattttaaaaggttaattaagaattgtgcattatttttacacagtttggaattttgtttatctttgcaggttgaagtgacaccaatagttggtgttcatactcatgaatacgaccacttggtttcacagaagaatcctgaagacaaggatctgttggatgtttttgatcttgtgatcaaaggatatagaatgagcaagaaggattggtgtcagggatggattcaagtggaacaaggacatcaaggaagaattgatcatgtcttgaaacctgcaattgaaatagttgtgcatcaaagcagaaaaaggaaatcaatgtcctttggtgagaaggtaaaactggtatatgaaaattgtgaggttcttaagaagaaagttggaaggctgaagggctatttaggcatcgaaagagttcctgccagttatactagagaagaacaaatagaagaggacgaaaaaaaggagcaggaagaagaaaagcaagaggaagaaggaaaagaagaggaattagaaaaggtatgtgtttttacaagggattttaaaagcttataaatcgtgttttaaagatttttagccgtttttaaaagataggcagtgttagatatgtatttacaagggattttaaagacttcttaatggggttttaaaagattgaaattcgtttttaaaggataggcagtgttcgataagattttacaacggattttaaaagctttttacaagtgatttacatgagtaacttgtagttataaaacttgtaattttatatataggttgaatacagaggcgacgaagggacagaaaaacaagaaatccccaaacaaggcgatgaagaaatggaaggggaagaagaaaagcaagaggaagaaggaaaagaagaggaagaagaaaaagtatgtgtttttacaagggattttaaagacatcttaatggggttttaaatatttaaattcgttttaaaggataggcagtgtttgataagtatttacaacggattttaaaagctttttaaaaagtgatttacatgagtaacttgtagttataaaacttgtaattttatatacaggttgaatacagaggcgatgaagggacagaaaaacaagaaatccccaaacaaggcgatgaagaaatggaaggggaagaagaaaagcaagaggaagaaggaaaagaagaggaagaagaaaaggtatgtgtttttacaagggattttaaaagcttataaatcgtgtttttaagatttttagccgttttaaaaagataggcagtgttagatatgtatttacaagggattttaaagacttcttaatggggttttaaaagattgaaattcgtttttaaaggataggcagtgttcgataagattttacaacggattttaaaagatttttacaagtgatttacatgagtaacttgtagttataaaacttgtaattttatatataggttgaatacagaggcgacgaagggacagaaaaacaagaaatccccaaacaaggcgatgaagaaatggaaggggaagaagaaaagcaagaggaagaaggaaaagaagaggaagaagaaaaagtatgtgtttttacaagggattttaaagacatcttaatggggttttaaatatttaaattcgttttaaaggataagcagtgtttgataagtatttacaacggattttaaaagctttttaaaaagtgatttacatgagtaacttgtagttataaaacttgtaattttatatacaggttgaatacagaggcgatgaagggacagaaaaacaagaaatccccaaacaaggcgatgaagaaatggaaggggaagaagaaaagcaagaggaagaaggaaaagaagaggaagaagaaaaggtatgtgtttttacaagggattttaaaagcttataaatcgtgtttttaagatttttagccgttttaaaaagataggcagtgttagatatgtatttacaagggattttaaagactttttaatggggttttaaaagattgaaattcgtttttaaagggtaggcagtgttcgataagattttacaacggattttaaaagttttttaaaagtgatttacatgactaataactgtgtcctggcttgtatttgggaacttgtaattatttatacaggttgaatacagagatcatcattctacttgcaatgttgaagaaacagaaaaacaagagaatcccaaacaaggcgatgaagaaatggaaagagaagaaggaaaagaagaaaaagtagaagaacatgatgaatataatgatgctgcagatcaagaagcgtatataaatttgtcagatgatgaagataatgatactgcacccagagagaaagaatcacaaaaaaaaaaaaagaagaaacaaatgtctgctttccttaactttttaaaaagacatgataaaattgtcaaaaataaaaattttgttttgatgttttggtttacaggttttaaaacaagaaaacgtagaagaacatgatgaacatgatgagactgaagatcaagaagcatatgtaattttgtcagatgatgaagataatgggactgcacccacagagaaagaatcacaacaaaaaaaggaagaaacaacagaggtctgcattccttaattgtttacaaagacatgataaaattgtcaaaaaataaaaatttgttttgatgttttggtttacaggttccaaaagaagaaaacgtagaagaacatgatgaacatgatgagactgaagatcaagaagcatatgtaattttgtcagatgatgaagataatgggactgcacccacagagaaagaatcacaacctcaaaaagaagaaacaatagaggtctgcattccttaattgtttaaaaagacatgataaaattgtcaaaaaataaaaatttgttttgatgtttttgtttacaggttccaagagagaccaagaaagatgataaagatgttaatcaaacaccactctctacgcaagaagaagaaatcacccagggacaaagcagtcgtaagttctttttacattcacagatgatttgccttgataaacaacttctaaatatatttttttttgtttttgtatcagttcaaactcctttgacgctggtcatgttgagtcaggaagtaatggaagaaattgacctaaaagttaaaaaatgggcgaaaaaaaattaataagagatctactatcgtcacttgaagaagtaggttaaattacatcattgttttgctgcaaaagattttaattctaatcatttggaatttttacatttcagattctttggcccgacagtaaatggcaaaaagtcgaaatttgggatatgtgggacgagaagaaatacaaattagtattaaagaaagcaacgttactcattcatcctgacaaactgcctcgagctcatccagaagtgaaatacctagctgaacaaatctgcaagataataatggttagtgttaaactcttcttttgtataacgatatatctttaaaaacttgaatattattgttatgcaaaaaataacttataggttgaattttatttgcaggtagagaaggacagagctactaaggcaaaaatggatttagttctttagactgacttatttcaaacatatttattttacttttgttatttggaatctatgattgtacttgtattttaattatgactgtcaaatctaatcaaaatgctttactattgtcaactgtttatggttttataagaattgtcatgatttacaagtgattttaaaggcataaacagcttacatggtttgctatcggtttttaaggataataaagtggtaaagcatgatttacaagggattttaaaaggttttaaaaggggtttacttgattaacaatcgtttaagaagaataagttaatgtcagaaaatgatttataagggattttaaaagcttgtaaaagtgtttaacttgattcacaattgttaaaagtatatgtaagtggcataacaaaatatttacaaggtattttaaaaggattttcaaagacgttttaaacaggtttttacaaaatatgttaaaaaggtaaattattggaattactattaaaattacttgtaaagtttgatagtaattttagtaaacgacttacaagacattttaaaagattcaagttaaaagcttgtaaaagtgtttaacttgatttacaatcgtttaaagtatatgtaagtggcataatgaaagatttacaaggtattttacaagaatttaaacagacgttttaaacaggattttacaagagattttaaaaggtaaaatattggaataaccttcaaaattacttgtaaaagtttgatagtaattttaacaaacgagagtaatgacacgacacaatgaagaaaatattaaaaaacccaacaatattattctttggagataaacatatatctaaattgcagcaacacaagttgatttgttgtgacccgaccgaccacacctactgcatttgtgtaattttggttttggctgagaccgtccatgctcccaaacagaaggtatcctctttttctcccgtctgccactaggtacacgagtagaaggtgggagacaaataacttcactaatagtttctagaatctcccaatattccatatcaccatttgggtgaatgctctctgaatatgcttgacgccacctgtaaattacagctatgtaaactgagattaaaaccacataaacatagataaaaccataaaaagagatattaaaacatttaaaaacgcctgtaaagttgtgaagaatagagataaaacctgtaagtagaatgaaactcatcaacaaacatgttttcgttcagattgatatgtttagcagaagcaattccatgtgcgcaaggaaatttatcaatatcaaacatacagcatgtgcaagtccttttgtccagattaaccaaatgcgttttggtatctccttttacctcaaactcttcttgattaacttgacaaacctcaagccatcgtgttgaagtatcatatgacgctttcattttcttccctacatttatagtaacagcagacggatgttgactactctcttcacgtcgctcattaaaccatcttgtcataatagatctgattgactcaaataggcaaacaatcggatactcgcggttctgtttcaacaaggcattaacagattcagctagattagatgtcatgatgttgtaccgatttgaaggagaataagttcgagaccatttcctaacatctacctcccaaagatattgtgctaactttttatcactattagtgatttcccagaacaaagaatcaaattctgtcttcgtgtaaactctagaagccgcatagtaaactggaataagtgaagaacctctgaaatgggtttccaagtttttttgcaaatgaaaagtgcaaagtccatgatgagcaagtggataattccctgaaagtccgcttgcaataaaagcagctcggtcagacacaaaaactaaatcattctcatcagggattatattcagcaaacacttcaaaaaccagtcccatgacgcgtcattttcagagtcaactattgcaaaagcaataggatacaaattaaaattcccatcctgagctgaggcaccaagcaaagtccctttaaactttgatgtcagatgggcaccatcaatagatatgacttttctcatcaacttataacctctaattgatgcaccaaaagccagaaacccatacttaaacttattagcagaatcttttttgaaaaaagtgatagaacctggattcgtcacttgtaccctgtggaaccacctcggtaaaacctcaaaactatcatcaggtaaacccctcgcaagttctgctgcatgttcttgaactctccaagccttcgaataattgattccaactccatgatcttttctaaatatttctatcagctgtttaggtctgagaggaagctttcctccttcaaaatggttacttatcaatcttcctaatgtccttgcagatgcttgacgatgactaacattccttaatgaagagtcacaactgtgatgactaacatacttccgaataacataactctcagatccaccagccctagttgcacgtagtctccaactacagttttcatcaatacaatgaagaacatacctcgtgagatctgatttcactgtatgaaacttaaagttgtgcttcactgcaaacatccgcaacgtgaataccatttcatctttgtctttgaaaatttttccaataaacaaagaatcagcatcacttagaccagttgaaaacgcggaactagaataccgttgatcaagaatactagatgtttcagatacacacgcctcaataatcctagaggttaacctcggctgccaaaataaaaagcttacctcaaacatcaatctatcttaaataatgattttacaaggatttttaaaaggggtttaaaaacgttaataatgattttacaagattttttaaaaggattattacctgagtagtagatgcagaatgagaagcaaaaggatttgaagtcgtctcagcctgtagtaaactcaatcactgacttaataatgattttacaaggatttttaaaaggggtttaaaaacgttaataatgattttacaaggatttttaaaaggggtttaaaaacgttaataatgattttacaaggatttttaaaacgattagtacctgagcattagggacagaatgagaaacaaaaggatttgaagtagtctcagcctgtaataagcacaatcactgacttaataatgattttaaaaggatttttaaaattataacacaagaaggttattgaaaaacctgctcaactatcacagaaatttgctctacagtcaaacataattgaagcaatcctccactctgtgagaatttgtgcataaaagttgcaagctgtctatcgttcctaatataaagaggatgagattgtatggttgtagacgtggagactaacttgtaactaagcttcaaagaattggttgaactatctatttgaaaatcctctacaagaatatcaaccaacgcgtgataggtaatgtgctcatcaatgagcactaaagaagctcccaattcaatgtctaattcaaattcccaagtcatattgtttgtcaacttccacaagccacaaacagaatacaattctagcattataacctgataagataaataacaacaaaatcaacacccacaaaaacattttcactacagagagaagcaaggtttacaaatcgttttatagagtaagtaagtagcatagaataatttacaagggattttaaaagctttgaaaagtggttaacatggtttacaaatcgttttaaagagtaagtaagtagcatagaataatttacaagggattttaaaagctttgaaaagtggttaacatggtttacaaatcgttttaaagcgtaagtaagtagcatagaataatttacaagggattttaaaagctttgaaaagtggttaacatggtttacaaatcgttttaaagcgtaagtaagtagcatagaataatttacaaaggattttaaaagctttgaaaagtggttaacatggtttacaaatcgttttaaagcgtaagtggcatagatctatcacgaaagcatatgcaaaagaggtaaacactaaatcagaaccaaaatctattacgaaatagtataaggaattcacataagcaaatctatcacgaaacagtataacaaattcaaaaggattttagaacagtataacgaatgtacaaggattttagaaacaaattcaatcatcaaatctcaaacaaaattcaaattcgaagctgaagcaaatgtcaaactgtcgattgaatcaggattcaaataacgaattcacataatcaacaacaaaaatcgaataaaccaattcgaaaatgaagatttaagctaacattataaaatcaaacctgggaaacgcaagagattcgacggcgacacacagctctacttacgacagcgaagatgggttttcacggcgagtgaactcactatttccgacggcatgggattcaacggcattcacaatttccgatggaggaagaagagagagtgtgaagaaatgaattaggtatgtgggtagctcattaagggtaatttggagcgaaaagtattagaaagggtagaaatgaaaataggaaaaaaaaagggtaaagttgcaaaagggcattgagaaaagggcattagagtgaattattctatttttattatcagatattacttaaaatatattaaactttatcaaaaatattattttgtttattaagtataaatatacatctatatttataaatctattattagtataatattttattttctcattcagttaaatgtatccaatcaacatattttaaaaatattttcattctgtgaatttttatttgcaagttttcattctacgaatatgttgagatttcttgtgtccaataatctcagttttaagacccatgagaagatggtattggtttggagttagatcaagaatttgaaagcaagtagacaatgcaagatttagttgatagaactacacatcttagttgttattggtatggtgttaaaaaaaaattgtttgaatatgtgataaaaaaagttaagaatcattaaaagagtgtaaatgatacttatgaattgcaaagtttaagaattc

SEQ ID NO: 181 - DNA, 96332 bp, Arabidopsis thaliana
aagcttcaaagaattggttgaactatctatttgaaaatcctctacaagaatatcaaccaacgcgtgataggtaatgtgctcatcaatgagcactaaagaagctcccaattcaatgtctaattcaaattcccaagtcatattgtttgtcaacttccacaagccacaaacagaatacaattctagcattataacctgataagataaataacaacaaaatcaacacccacaaaaacattttcactacagagagaagcaaggtttacaaatcgttttatagagtaagtaagtagcatagaataatttacaagggattttaaaagctttgaaaagtggttaacatggtttacaaatcgttttaaagagtaagtaagtagcatagaataatttacaagggattttaaaagctttgaaaagtggttaacatggtttacaaatcgttttaaagcgtaagtaagtagcatagaataatttacaagggattttaaaagctttgaaaagtggttaacatggtttacaaatcgttttaaagcgtaagtaagtagcatagaataatttacaaaggattttaaaagctttgaaaagtggttaacatggtttacaaatcgttttaaagcgtaagtggcatagatctatcacgaaagcatatgcaaaagaggtaaacactaaatcagaaccaaaatctattacgaaatagtataaggaattcacataagcaaatctatcacgaaacagtataacaaattcaaaaggattttagaacagtataacgaatgtacaaggattttagaaacaaattcaatcatcaaatctcaaacaaaattcaaattcgaagctgaagcaaatgtcaaactgtcgattgaatcaggattcaaataacgaattcacataatcaacaacaaaaatcgaataaaccaattcgaaaatgaagatttaagctaacattataaaatcaaacctgggaaacgcaagagattcgacggcgacacacagctctacttacgacagcgaagatgggttttcacggcgagtgaactcactatttccgacggcatgggattcaacggcattcacaatttccgatggaggaagaagagagagtgtgaagaaatgaattaggtatgtgggtagctcattaagggtaatttggagcgaaaagtattagaaagggtagaaatgaaaataggaaaaaaaaagggtaaagttgcaaaagggcattgagaaaagggcattagagtgaattattctatttttattatcagatattacttaaaatatattaaactttatcaaaaatattattttgtttattaagtataaatatacatctatatttataaatctattattagtataatattttattttctcattcagttaaatgtatccaatcaacatattttaaaaatattttcattctgtgaatttttatttgcaagttttcattctacgaatatgttgagatttcttgtgtccaataatctcagttttaagacccatgagaagatggtattggtttggagttagatcaagaatttgaaagcaagtagacaatgcaagatttagttgatagaactacacatcttagttgttattggtatggtgttaaaaaaaaattgtttgaatatgtgataaaaaaagttaagaatcattaaaagagtgtaaatgatacttatgaattgcaaagtttaagaattcttcaattcatttttcggttcgagttagagagctggtttcggaacaatggtggtcattaagattgaagtccaaattagtgtatttgtgtctctattttttttttttaatcgttttgtataatttagtaaaactgataatcataatagtacaactatgaccaatttaacaaatttttatacataattaaaaaaaataacaatttataaatttaatcataattagatttacacttaataagttcaacaatttttttaaatcataagtagatttacacttaataagtttaaccagttaaacaaatcttcttaaataacattagtttacaaaacaatttagataatcttcactaaattcattttgtacaacaaagatcttatacttttatgataattttttttattgtttatccagattacattgcaaaacacacaaaataatgtttaaacacatatttttgaatgagaacatggagaatgtacctcaaacaactaaaatcatgagtacaactaaattgtttagtttaaatccaagtataatttattatacacgaaaatctcaaaatgtacaactgtgtatacgagagtataatttggaaactaggaacaactgtgttcagtttgtgctgtcacctgtcacttgtacttgttttgcagctccacattgatgcggacatccatatcaaaccaaaccgggagcataccaaaccagccggtacatctatcaaacatattaaaaaagagcattttggaggattcttgcccaattggatcggagtctcaatcaagcacaaggcgtagggttaattattcacctacaaattaaccctataaagactaatgataattcaagaagggtcaaagaccagcgagtcgagtcaccatattgtggggatatgaccgttgcactatttttcccttacctaggatgtgtcccaatgagtttacctaaaaaggtttttaacgaggcaacatcaagtcatcaaggaatcatttaccaagaaaatgattcgaagatatcacgagtacatatatctgatgtacttgctaacagactggctgaactacccgctgaactaccttctcaagtaccgcacaaaatgaagccaaacaaggaaatcttccttattctacacttggacgcacctcaaagctacatatggaaagcagtagaacatctacaccacataagacatgtaccacacgaactttggtacatcttcccacacaagaacccgcagagttactacttgccatatatggagccgaacaagatcgatttccaacaactctttcctcttttgtttatgcgcttatgtgagaatcttgagacattccagaaccttccaatacgtcacaacttcctccccaagttgacaagatacaaggcacacctcatttcccttatttggacatattctacaattaatgtccaatattttctttaatgttttggttctttttttgaagtcttagaacgttgtactcagctctatataagctgatttctcattcattgtaaagcaccattgatcattttaaaagtaaaagaaacgttttttacttgtcaaagtttgagccattgtcatttattctgtagttctttgtgagtgagtcactaagtacttcaggaatttgcggattaagtttgttgagtgatacaacatccttcattcgttcattgatcgagtgagtcgattaatccactgattgaacgagtcaatcacccttctatccgtcatttctccttgaattgatcccacacgagagaagcgatcgccaacgtgtcagatcaccaccttcatcactcctcccctcccccccattccgcgtggcaagcttggaactcttgatcatcaagtgatctaaagtcgggttaactccaattcttgcatcacacatgtattttatgactgtaatgcccccagaactcggcaagtccgatacggcgtagagatgccacaatggaaatgagatcccattgagtagccaaggttcaagaacacctcccgacccttagcccactcgagattatccatttccccacttgggatccatttaggcttgccaaccctcacttcacccaaatgttgtgtcgactcggactaagtcttatcagattaaaacctgtaaagtgtaaaataaataccgatttaattatttaagagtgatgaaaatacaagggaaaattacaagataaacatcgtttttatggccaaggcatgaggcccaaaagtacacgatactaaaatacatactttgagttttacaaaaggacactgaaaaactacttcgggtttcctagcgttcaccactccctctaaaccactctaaggttacctgcaaaacaagtataatcatgaataatctagcattactcaatgagttcggattccccaaggaaacgttagtctaaccccacccataatcctcacatgcataacataaacaatcagaataaacgcagagaaggtagtaaacaacaaataaaacaatcaagaaataaaactttttcttaaagttttattagggtccgatacactgccttcctcgacacaccgtgaacacccgagttataaccacaaaggcatataactagaacatcaccttggttacaccgtcgtgtaaacgacaccggccagggtagctagcccagtctctcctggtccttcgatccccatgaggcctgttgcatctcgtcaagcaatcatcacaaaagaacggaatctcacgcaaggccagctacatcccacttgaccgtagcatgcttatggatcgacttggataactttcacaagctccacacgctacgatcctcaatcaacactatgaaagatatggttcgttctcaacacattttatcatagtgttctcaaacttggcaatcgaatactagagagtggtgtctaagacaacgcaaccatccctcttaagcgaatggtgcttcttgtagtacaaccactcctttagggcaaacggagctttgatcgcaaccactcctagctaatctgaaaggccccgatccggactgcctaaagtccggacgagttctctcgacccaagccagtaagtgactcggccctaaccgtttatgaggttctttcctagtctaatccgttccatatgattccgtgattcaatatatgagacgaatagagtaaacaaacaatcggatactttattgattaagcaaaggattcgatacaacctatgagtttgcatataagctattacaagtcatataatcgatccctaaactatccgaactatcaccacccatcatcccggccttgagtctctcgcgcctaggccaagtccttcccacgatcaccatttgttcctgaaagtcatagagccataagtaatctcatttacttaatcatatgcaagtccatgcaatgctctatatgccatacactactcagatccgtggagagaattcagagaggggaagatcgcgcatcagtccggccgattctcggcaggtcagttaagacccgccggtgctccgccgagccgcgtccccgcctcagccgatccctacccggaccgagtcttgtgtaggatgcacatgacccggatactacccagccctctagtcgatcctttcaaggatccgactactaactcacatcctagaacccttagactcaaagtctaggatcccttaccttccttctcgaggttaggtcgatctgaccctccttctttattgccggccacagcccggctaccgaatcctaagactatttattctcccaagagggagagagttttaatggtgagtttcttgtgttttcggtgtgttgtggtgagtggaatggtcctgggcgcccttccttatatagggggcgaaaggatgcttcccgaatcaatacatccgttccttgcacctttccgaagagttgcacctttccgaagagttgcgcccttccgaagagttgcacctttccgaagagttgcacctttccgaagagttgcgcccttccgaagagttgcacctttccgaagagttgtatctcttcgcccataaccgcccagctagtccgtcactcgtccagctacctcgagctcatccgtcactcgtccagctacctcgagctcaaccgtcactcgtccagctgcccgagctggactgtcactcgacctgagtaaccgtcagtccttccagctgagcttgagctttgggcgagctgacccagctgatttccgaagagttgcgcccttccgaagagttgcacctttccgaagagttgtatctcttcgcccataaccgcccagctagtccgtcactcgtccagctacctcgagctcatccgtcactcgtccagctacctcgagctcaaccgtcactcgtccagctgcccgagctggactgtcactcgacctgagtaaccgtcagtccttccagctgagcttgagctttgggcgagctgacccagctgatttctttacgatcctagcttagcctgcatgatttcccctttgtccgagcttatggccagctccttctcacttgtccgagactccaccttcatctctcggaccaagtcctagccaacgatcctattgaggatcgcgggcgttacaagtctccccccttgaattggattcgtcctcgaatccgcatcaagttgatctttacccatctccttgaaccactccggaaaattggccttcatcttattctcggtttcccaagtgtattcttcacggcctccacaattccacaagacttttaacaaatcccttgattttccccgagtccctttcgtcattcagtccatgatccgtactggccatgcttccaccgtcatgttctcctttaacccgggaggtacatcttccacactttcttcttgatcacttaaacacttccgtaattgtgacacatggaagacgttgtgaaacgcatttagttttggaggaaggtcaagtttgtatgccaccgcccctactcgttcgatcaccttgtacgggccaacataccttgggcttaactttttccttgaggtgaatcgtcctgcccctttgtaggtcatcgcctttaagtacaccaaatctcctacttggaattccaattcctttcgacgtttgttggcgtagcttttctgtcgatcatgggcttcctttaacttgatttttaagaacttcattctctccgtggtttcatccacgatcgtaggtccaaacaaccgacgttcgcccacgggcgtccaacacaacggtgttctacaagctcggccatacaacgcctcatagggagacataccaatactagcttgaaaactattattgtatgcaaactctactaacgttagatatttctcccagtttcctccccaatccaagacgcatgccctcaacatgtcctcgagggtttgaatcgttcgttcggactgtccgtccgtctgtgggtggtaggcagtacttaggttcactcgagttcctaaggccttttggaaagccttccaaaaatttgacgtgaaccttgtgtctcggtctgacactatactaaccggaatcccatgtaaccgcacgatctcgtctatatacttctcggcaatgatttctgctccatccttatccgagatcgccatgaagtgcgcagacttagtcaatcgctctaccacaacccataccgcattgtgtttggacttgatccccgttggcagtccagtgacgaagtccatcgttatgtggtcccacttccattccggtataggtaggttttgtaacaacccacttggtacttgatgctccgccttgaccagttgacaagtcgggcacttggccacccatctggccacgtctttcttcattcctacccaatggtagtaccttttaaggtcgcggtacatcttgttcgacccaggatggattgagaacttcgattgatgcgcctctcttaggatctcctcctttaatgccctatcgttcggcacacatactcgaccgttcaccacgattgtaccattgttcgaggtttggtactcggttttgttgtttagtgcccatccttttatctcctcgtcccgttcctgagccagccggatcctactaagcaggtcggcctgatcggcggctcccaaccctaaggattcaacttctttagataaggcattcacatgcaatgtccccatcatgttaaccaagtccacttggctccgttccgcctcaacttccgagcgcctcctactcagggcgtcggcgacttggttggccttgcccggatggtacgctatgtccaagtcgtaatccgccacaagttccatccaccttctttgccttagattcaactccggctggatgaatatgtactttaggcttttgtggtcagtatagatttgaactttagcaccatacaagtatgatcgccaaatcttcaaggcaaatactaccgcggccatttccaaatcatgcgtagggtagttcttctcatgtttccacaattgccttgatgcgtatgcgataacactccccttttgcatcagtacgcatcctagtcccactatggatgcgtccgtataaaccgtatagggctcaccttcctccggtaagaccaatactggtgcattagtcaacatggcctttaactccaggaagcttttctcgcactcatccgaccagttgaatgcggtgtcttttccggtcagtcgagtcaagggttgggccatgctcgcaaaactcattacgaaccttcggtaataccctgctagtccgagaaaactcctaatctcggtggcattccttggtcgtggccactccttcatcgaccgtattttctccggatcaaccgatactccttggtccaagataacatgaccaagaaaaccaacgctcctttgccaaaatgagcatttacttaacttcgcaaatagctcatgttcccttagccgttccagcaccgcccttagatgttcttggtgagcttcccaagatttcgagtaaacaaggatgtcgtcaatgaagatgataacaaactcgtctaagaaatcccggaataccccattcatcattttcatgaaggctgctggtgcattggtcaatccgaatggcatgaccacaaactcaaagtggccgtaccttgtccggaaagccgttttcctcacgtccgttggctctatgggaatttggtgatatcctgaggccaagtcgatttttgaaaaccactgtgcacctccatgttgatccatcaactcatctatccggggtaaaggatatttgtttttcaccgtaactttattcaatccccgatagtcgatgcatagcctaaagctaccatctttctttttcacaaatagaaccggcgcaccccatggtgagctactcggcctgatgaatcctttatccaacaactcctccaactgtttctttagctccgccatttccgccggtgccatccggtacggagctttagatatgggggttgtcccgggctcgagttctatcgtgaacgggtctaaccggtccggtgctacaccactaacggccgcaaacacgtccgagaactcgttgacgatcagaatgtctttcaactacgcactcgcccccacttccttggttgtgatcgtggctaaatatgcctcacaacctttcccgagcatcttttcagcctggattgccgagattaccaagcttctcgaggttgttcttattccttggaattttaacataccctcgtccctctcgaattgtatccggcctcggtgacaatctatgtgagccttgtacttccccaaccagtccatccctaagataacatcatgtttctttagtggaacaatgattaggtccgcgggcatattgacaccgttcactacaaccgagatgccccgaacaagtccggtcggatacattgcctgtccgccggccgctcgtaccattccataatcggtgtttggttctttcctgaacccacctgtttcaaccaattccggactaacaaaacaatgtgtagccccagaatcaaatagagtgtgcgttactacgtcacctactctcaaggtccctacacattcccttagaatgctgagtacctcccatttcccatatgcatgatgcaatgcaaatgcagttattgaaataatgaatagggagttgtgagaacgtaccagtgatcgccctgaagtttccggcatcgttagcttcctccgacaactcataaactcgcggtgccacggcttgccgcttttggggaggcggcagtccatttcccccgcgattgtccctttgtccggcctgcttctccgcagtcaacttagggcactctcgctttagatgtccagtctttccgcaatagaaacaagtccttgtctcttcaccgagaaccttggactgtcctggttccattctcgggcaactttggatcgcatggtccttgcttccacaccggccacatgcacctatggccttcagcaagttccgctgtggctcttaccacaggtcacgcattccccggtcttagcatcggacttggtgttatccaccttgtcaaatttccttttcttatttgcgggtttggtggattgattgttccggatcggtgctttctcccggttcaagtacctctcctcctcgatcccttcctcaatcattgctgccctttcaaccaattcggaaaccgagttgaatgtccggaccaaacaatggttgcggatctctatccttagtccacagataaatcggcgcacttgagcttgttcctccccaagttcacgtcccacataacgccttaggcggttaaattcctcatcatattcacgcaccgtgcggttcccttgaactaggtcgaggtacgcacattcaagcctatcccaagcctccggtggaaagtacttcttgttaaactcgtcttcgaaatccgcaaaggaccggacctcgtcccctctgcgtttctcgacggttaaccaccagttatgggcgtctccttcaaggaagtggaccgcaatgtccctttggtaatcctcagggcagcgggtagacttgaagttcctcttgagtctactcctccactcatcggccacaatcgggtctgtactgcccatgaagtgtctcgtgcccagccttgagacatgttcgagaagactcagatagtctcccctttttcgcccatgattcggttgtggattcacttccacaacttccgagtcatcgtccttttggttatccactctttggaccactggatccgctacaacggccttggtcaatgtggctagttgcgccatcactcccttcatcaaatcccactgttcttgggccgttggagtattgttccggttatccgtgttgtcccttgcaccactactctccggtgcttcctcatttatggacttcttcccggcctcaggtccggccgagtctgtcccatcgagcatcgtcccgactctggttttctcgttgatcatcgtttcctcctcaaccaaagtctcctcgacaatgcccttatccttcttactctttcccgttttgctgctcttacccatctgcgaaacctccaaagttaatccacataactcctagtaaaatagcaaaagagtaaagaacaactaccgcgagattctcaagccgacgagtggtgataccccttaacccaacacctagtcctagaaccaagcatgctctgataccaacttgaaaggccccgatccggactgcctaaagtccggacgagttctctcgacctaagacagtaagtgactcggccctaaccgtttatgaggttctttcctagtctaatccgttccatatgattccgtgattcaatatatgagacgaatagagtaaacaaacaatcggatactttattgattaagcaaaggattcgatacaacctatgagtttgcatataagctattacaagtcatataatcgatccctagactatccgaactatcaccacccatcatcccggccttgagtctctcgcgcctaagccaagtccttcccacgatcaccatttgttcatgaaagtcatagagccataagtaatctcatttacttaatcatatgcaagtccatgcaatgctctatatgccatacactactcggatccgtggagagaattcagagaggggaagatcgcgcatcagtccggccgattctcggcaggtcagttaagacccgccggtcctccgtcgagccgtgtccccgcctcagctgatccctacccggaccgagtcttgtgtaggatgcacatgacccggatactaccaagccctctagtcaatcctttcaaggatccgactacttactcacatcctagaacccttagactcaaagtctaggatcccttaccttccttctcgaggttaggtcgatccgaccctccttctttattgccggccacagcccggctaccgaatcctaagactatttattctcccaagagggagagagttttaatggtgagtttcttgtgttttcggtgtgttgtggtgagtggaatggtcccgggcgcccttccttatatagggggcgaaaggatgcttcccgaatcaatacatccgttccttgcacctttccgaagagttgcacctttccgaagagttgcgcccttccgaagagttgcacctttccgaagagttgtatctcttcgcccataaccgcccagctagtccgtcactcgtccagctacctcgagctcatccgtcactcgtccagctacctcgagctcaaccgtcactcgtccagctgcccgagctggactgtcactcgacctgagtaaccgtcagtccttccagctgagcttgagctttgggcgagctgacccagctgatttctttacgatcctagcttagcctgcatgatttcccctttgtccgagcttatggccagctccttctcacttgtccgagactccaccttcatctctcggaccaagtcctagccaacgatcctattgaggatcgcgggcgttacataatcgataagacaaccttaataaactcaaagataacaaaaccaaacctaaaggaagggagaatcgaaaacatgcaagaatgaaatcaaacatgcaagaactaaaaccggaactcacaatcaccggcgaatcctcctaacttggtcgacgatctctaactcgggctctctctctttctctctcgggttatcctaaaggttcggacgatcgggttttttttgggcagcctttcggtgagaaaatttctaagtgttcgactaaaggggggtgtggtcctatttataagctaaggttgcgggttggattaacgatgggaggaggcgcgtgaaatgcaacccgtggtcttaagcggattcggctccaagtctttggacttgggctccaagtcggcttgcatggctcggatggaaacttggtcaccaagttggctcgaccgaatggattcggctccaaggttttagacttgggctctactctggcttcctcggtttataaataggcgaccctcctcattctttcatgcgcatttctctcctctcctcctcttgcccttcattcttttccgaggtcaatacgcggggtactacaatgacggtgcagtttgacccacatgctttgatccacttgcaatttgacccacgtttttttttaagttttgaaattttttatttttcaatttttttgtttttaattaaagatagagaaaagatgagacagaacaaaatctgggtagtacatctacgtaccaagttatacctaacggatacttcaaataactatattaaacaagttgtactaagattaacaaaccacgtagttataccaaaataaaaaatcaaccaactatttgcaacccccaaattggtctcaaatcagtcgcaaaccaaggttttacctatataacgactgaaaaaaacagtcgctaaataaattagtcgcaacatggtcgcttatttacgactattatctgaccgcagttttcagtcgcacataagcgactggtttgtgactactttagaaagttgtagatatccgactaaaaagcaacgccgcttacttaagacagttttgagacgaaaattgttggtctcaagtgatttgggactctttgttctactgtctgttacctaacctgattagattttgaattgagaagctattagtactaaataaagaggattaaaaacatgaaacaagttaacattcctaaaatcattcactcatacattatattatcatcttaaattgttttcaacaaaagataaagtttttcaaaaaaccattagaaaatcaagttcaatggttagaagaactattagacaaagtagctgaagtggagactaatgtagtggtgcctaatccggtgtcttctggggtgcatgtggtggttggaaatgtgcttggagttgggttgtttagctgggtgcctgtggtggttggttagaggggtggttttggttctgtagaatcagtagacaaaaacgcagccaactcaagatctttttccttcatgaagaggagaagctagcttctccatccgatattgatattgccggtgctcctcatcacgttttgcattttgagcttcatgttttgatatcttcttctgcaactgatcttgaagatccacaatggttgatgtagaagagctcgcataacactccttcctttttcttttgttcagcgtctccacaagcgatccaaggccataagggttacctttgccatctttatgagtacactgaaacaagaagacaaaggcacaaataaaatgaattaaatcatgagaaccaaaaaaagagaatcatcattactctaagcatctatcactcatcaaacaaagagtaagacaatcataatttccaagcaaacaaagacaagcattctaagtaaataaaaacagaaatgaataaccttaagaaatatctcattcttctcttcaaggctgagtgtacgctgagttgaatgctgagaggaattgtcagaaatttgaggaccatcccgatctatttcagacatcctctcttcaaggctcctcgcatatgcctcaccaacttgttgagatttttgatccacaaaagatccatcagccctagtatgtgttgcaataaacacttctccaaatgtgacaggtcgcttcaaacgttcctcctacaatgaaaataaaagagattaaaatcatagaagcaacattagataatatgttaagtgaatcgtttggatgaaaagagaaatcttaccatctcttgatgaacttgcaaaaacgatttctgcccagctacatgtttgtgcactccaagacctccacgagtagagtttctacattgtgaagcattctcacttctctcaatagcatctttagtgttccaatgctcccacatccgagcccaaagtttatcccgaaatccacggtggttgtgaaccacttttctttgcttgactgaaaatcccttacatccgcttcttggctataaccaagaatccttctttaacaagctcagtaatcccactatcccaattatagttccgctacaaaacaagtagttaagttagcaaagatacttcatatatacattaacaaaatgaagaggtttatatgatagtaccgcaaaattcttgaagtatctctcttgaatgtgtattggtgtaaccttccaaatgaagtaaggcccatcaaacttcctccgaaatattccagcaatcactctagacagcttccccttgtgccggttaaacttgtaacaaaagacacaatattaagttgatatcacactagacaatggaaaaataactcgtaagtatacaaactacaaagactttagttgatgcaaccaacagagaattaacaacttaatgaaaaatgctctcaaaacagatggtcattcacaaacacaaccgggtactaatctcaatcaccaactcaaaatgatatctatacaaacacaaccggttactaaggtcaatcactaactcaaaatgataattatacaaacacaaccggttactaagctcaatcaccaactcaaaatgatatctataaaaacacaaccggttactaagctcaatcaccaactcaaaatgatatctaaaaaaggtgaaaagatagagattaccaaagagtctcgatcccagggataggcttttcagacagaagtgcaagttgttgtaaacctggaagggctagtaaagaatccaacagatcttgatagtcgacattatggttatcttcttcgggggaattagggtcttcttcttcttcctcttcttcttccccatcttcttccccatcttcttcccaatcttctaccccatcttcctcttcatgattattagggttttgttgctccgtttgacgaggctgttgttgaagacccaaagattgatgttgacgagaaggagccttttgttgacaagtaggaggctgttgttgactcgtaggagcctgacgttgacgagtaggaggcagattgcgatgaacgggaggcggttgttgagaaccagagagcaagggctgacgagaattagtcggggttagtgtcgtttggggtggcgtcgtctgtggtacagtagccggtggatattgtgaaggacggctcctatgggattgtgtcgccgaattagggttcgacgagtgagaagaggctctgtgaccactcgaacctaacactggatttttaccctggaagacttggactccggttgacgattcgcgaactcgacctctacctctacctctacctctacctctacttgattttcccttaccaccagcagccataacgaatgaagaacccctagatctagaaatggtgaaattagaaagcgaaggggttggattgaaacagagaagagaatctaaatctagaaaccctagatctacacaataaaaaacaagaaatcgagttgaagaagaggagaggtgagagcgtttaaccgcagaattctaaagagattgaaagcgaagaagaagaagaaacgataaaaacaagaaatagagactttataaattattgattaaaaaaaaagtctatatttagtcgcaaaaaagttgcaaagtaaactgtttggggggggggaattgagcgccaaaagacttaggcgaaaaattggtgaaaatgattgaaattaaaaacagtcgcaatttcgttgcacaattagtcggactttaatcacaaacaggtcagcaattagtcacacaataagtcaaatataggttaaacgtagcttattggtcgcaaacggcgaatgtgttgtgactctacattataaaatgcttggattccattgagtttgatccataaatcattgacaagcaatgatttagtagtatagagtacatacataagtgttaggtttgtaaatgttttgctttcttagcttattttataattgtttgaaaaagatcattcttgtatattaaagaacatgtaacacttgatatagattagggatttttgaatatttagatagaaaacatgcaaacacacctcactatacaaattttgaaatgcaaaacgcgagcgtcggttaaacgtagcttaaaggtcgcaaaagtgcgacttatttgtgaaactgtgtaataaaatgtttgaaatccattgagtttgatctataaatcattgagaagcaatgatttagtagtatagagtacatacataagtgttaggtttgtaaatgttttgctttcttagcttattttatattgtttgaaaaagatcattcttgtatattaaagaacatgtaacacttgatatagattagggatttttgaatatttagtttgtaaacattggaattgaagagattgattatattcttataactaatatcgatcaaatcaaactataaacatataagaaaacttgcaaacacacctcacaatacaaattttgaaatgcaaaacgcgagcgtcggtgaaacgtagcttaaaggtcgcaaaagtgcgactttttgtgacactgtataataaaatgtttgaaatccattgagtttgatccataaatcattgagaagcactgatttagtaatatagagtacataaataagtgttaggtttgtaaatgttttgctttcttaacttattttataattgtttgaaaaagattattcttgtatttgaaagaatatgtaacacttgatatagattagggatttttgaatgtttagtttgtaaacattggaattgaagagatttattacactcttataactaatatcaatcaaatcaaactataaacgtataagaaaacttgcaaacacacctcacaatacaaattttgaaaatgcaaaatgcgggcgtcggttaaacatagcttaaaagtcgcaaaagtgcgatgtttttgcgattatatttttttctcgctaacgggctggtaaatagtcgcatacctgagactgttttgcgactattggttttcgtcgttaagtagcgactactttgcgttcatgttagcggcagtcgttagttagtcgcaaagggatcacaaaaatgtcggtttattttgcgactgatagtttagtcacaacaaagagtcccaaaatgcaagttttcttgtagttatcatgttaacaaaaacaaaatcaacacatgaatttttcgtaaactgactcataaagtacttaaatcttccttctctcatcaaaataggactcataaacacaacagtagaccctattgataataagtttttagtcaattatcctaaaacaccaatcatgtcgttgtagtattttaggtgtcaatccaaatgagtgtgatgcaaacagatgagatgtgatcagaagtcactaagtcaagccaagcaataacagatttggggtttctagcagtcctaagtgaacatgcagaaaacagaaacaataacagacttactaaaatcactcgaccacaacaggctgatgccagaagtaggatgtggtcgagtattaggcaggatatgaaacagatatactcgactgcacagtctgttgccagacactgggtgtggtcgagtatactggtcgagtaacagacaggaaatgagacaactggactcgactgcacagtctgttgctagacactgggtgtggtcgagtaagttggtcgagtaattgcaaaaactaagaaacaagcaatgagaacgattaagcgataacgataaaacagagaaatcaaatagacgagaaattcctaaggatggggtaatcgaatagagtggtatcctagcctatccgaatggttaacaagcgcaatcaagctatccctagacaacaggttcgacaacagatcaattcactcccgtgatagaaatcctcaagcaaagctagcccagactaattcccattaacggaatataactatgcaggcaataaaaacagactgataaagtcaataaacgctctaaacggccaatcccttgggatagagacgaatatctcaggaactagtggatcaagcattccatcgaacaccttctgggtgcggaaatgcttgggatcgaattccagttgattagaaagaaataagcagtaaacacaactagtcctgaaggaattcaatcaattctaaaacttaaccattctacagactacggattccacaactactctatcccatccctaagaattctaagtcactactcagacaacatgctcaaagacataaacgcagataaatgataatattgcataagtaaagaaataaagagtagaaaaacaagatgacagatgaaatcaaatgaggaatctgaataatttggaaaaatctcgaattacaggttgcagaagcaaaagcggcgcagcagagtaaaacagaaaataaaactgaagcaaaaactcaatgtcgactagatgtctcaggacagaaccctaagacatctatttatacaaaacgaaataaaatgatagtagacgggccaataacctaatcgcccggcccatagaatgataatgggccaagatgggcttcgtgatccgatggaggtccaggccgcttccaaacactttgtcttctcctcttctcttccttgtgctcagcttgtctggttgagtgcgaatttgagtagactgtgaagacgtgatcgagtgtccggtcgagtgatggtgatggtggtgagtgatgatactcgaccagggggtcgagtaacttggtagagtgaatggccgagtgtggtcaggtggtgtggcgaagtgatactcgaccagggggtcgagtggcgtcatcgagtggcctgagctgagtagatgggaagaatggctccaaagtcactcgacctgggggtcaagtatggtgctggatgcacacgacctggtggtcgagtatgtcttctggttctggctcgtttcttccaatttgctcgcaaacagctccaaatcacctgaaaacaactcagaaatgcaatatgtatgcaaagctatcctaatcatgcaaagtatgcaagaatgatgagaaatgatatgaaacagtgatgaatgatacgaaactggactcaaaacgatgatgaatggacactgaaaacatgcaaattatagacatatcacctatgtatgtgttcttgattgtacgcttcaccattttattgcctcttccacttgtttctatatcgtcaggagcctcttcttcccgatcaaaccaaaacaacacatgaactttttctccttctcgttctttttattttctcccctttcggattctctgttattgtatatccttttaatgttgttcttctcctctttcatgtacatctgaatttgagctacacatatcaaagaaaatcaactcgaaccctcccaacaaattaacttactagtagtggagccaagcgactacaaatttttgaacgactgatatacatacatttaaagctttatcaaacttgataaatatctttaaggttaatccaaccttatcaaggcttaagcttgttgcttgcttatttattacggtttcaagctaaacttagaagtgtttctttgggaaatatgcaagactgaaacagagagaataagaagatattggtaaatgcagagaatgatgcagaaaaagaataaggagcacacaaacacagtttaacaagttcagctataccaaaccggtatagcctacgtctcgccgggaacggtgtcccggaatccactaaacaacatggaagagtttacagcttgtttccctcacccaccccaggcaatatacaaagctcactttccctcttagtgtttccccactctgtttttcctctgtttctgcaactcacacatcactgcatcacacctcttctctcttcataatgttcctctttatagagggagacatcacaccttgtgttccaatcctaaatgcaaagttgtcaccttatacgtaaccaaacatatacaccaccacagccacacagttgaattcactacaagacaactcacagctctctcttttgacgaaaccagcaactttgtttgtggtcccaaaagcttgaactaactatggttatatttgcatcaacctgagttactctttgagttagccttgtcatcatttgcttgtttagcaagactcaacttcacaatatcatttagaagaatagttcatgacgcaaagtatgtaatgtatgtagatcatctcaccaaattataattagttttatcttttattatcagaaaattttcttagttaagaaagaaacatagtttatcaaattctattaattgtctaaagattatagattatattgttgaatttctgcgagagattagatctattgcttcaaagtctacttctggaggggcttcttttttttccaaagatttttgcacatacaattgaattatttgtttgagccattacttatttacataaacttacaaacaaaattgattagattaacaataaattagataaatttatctaaattcaatctaactctaccaaaaattgaaaataaaccaacatactagaccaagttagactagaatcgataaagaaagatagaaaaaacccatagagaacgtaattattcaaattggagaagaagtagatacgaatttgaccaaattatgcaaataacaaagttgtatgtagttatatcaaatttaaaaaaaaataagacaacaataagagaagaataaaaaatgttaattaaattatttaaagctttgacccgattacaaaaaattcagaatattttttatccattttatttggttaggttggtaataaagtcaaattttaagaccatcctcaacgcaggtcttttagggggttcttagtttttttttgtgattaaaattaaatggcaaattgggataaaatttaagaggccctcttatataagaggcacaaacaatactaagaggtggtgacgtggcaatcatgtgggtgatttgttgaaaaaaaagggaggaaaaagtctctctttatttcctgaatcatctgacgacaaataacgacggcggcatctagccctgggagttcggctaaaccgggttattcgggtcggtttgttcggtttggaggaaagtcggtttgttaaacagaggagaagactaggaagatcgatttatcaatctcgattgaacaagatggtaagttttattgtttctcagttcatttttttttattcaaaattgtttagtaacaagatgagtttgattgtgattaataatttactatgaatctctttggagatttatggttttcgatgctaggatttggttctaaggtttatttcaaaattattatttcatagtaaaatttgatatttcatgattgcagggccggtccgacgtatactacgaccctaagccaaaattttttttttgccccacctttataacttttttcactcatcacagttgctttttggttcaaaaaaataaaacataaagctttaaaagcaaacagaggtatcaaaacagaacaaaagtatcaaaaaacagaacaaaagtattaaaaacagaacagaagtatcaaaaccaacaaaaaccaaaagacataagagaggatacataagttttaagcaaacactactgagtaaatatgatcctgcttgcatttttccctgcaaagtcatccatcacagtcgcataatcaatcttttcaagcattgctctctcaattgataatatggctaacccattgagcctatcctgtgacatggtggacctcaaataattcttgatcaacttaagcttagaaaaacttctttcggctgaagcaactgacactagaatagtcaataatatccgaaacgaaatccatgtgttaggataacaaccctccactcttttcaaaaaatccaacactttaataggtttcgtaacttcatttggtagcacttctcgtagaacttttagttccataaacaagtcagccccatctatatcagaatgctcaccatgcttaagggatgattcaagattcacacatgatgccatcaagttttcatcatttgcatatgtcaatttttgtaaatcaaacaaaaatccaaaagtttgttcatacctttggaattgctcaaaccttgactcaagagaaattagagcttgatctatgagtgtaaggaagtaattaattctgaaatcctcctctgttgacaatttcatattcccatgatcaaaatgcttctttcttctaatgatcttcttctttttcacaggaaattcagcttctatatccatagcctctgcaattcgtatagcctcagactttgctttctcaaatcatgtctctctatatttttgtaagtatgaaactaatcctttcagctcaagaatagcaacatcaatatcaatgtcatcagcttgtaaagtcttgctcactctgttgacaacagttagaagtcataccaaataatcataccaaaaagaaactcaaaccctccaataccatgtgtttctattcagcatcacttcgtgtttttggatcgtcggtcttttctgccaagtaaagtaaagcatctctgatttcaggagtctgaaaccgtattgctttgacactttcgagatgactctcccaacgagtttgagataaggatttaagtgttaaaccttttaccatctctttaaatatatcccacctgtttgttgaagatgaaaacaaacagtataaccgctgtataatcccaaaaaaagacactgcctttgtagaagaagatgctatatcacaaagcacaaggttggggctatgacaaccacatggtgtgtaaaatgctcttggattaatttccagcaatcttctttgcactcctttgttttttcctttcatattagacccgttgtcatacccatgtcctctcacatcatcaatctctaactccatatcaattagtacttcttgaatcgtagagaacagcccttcacctgttttatcattgacttccaaaaatttcaaaaagaattcttcaaccttaattggtgttgaagaaatatccacacatcgaatgagaatagtcatctgttctttatgactaatatctggagtacaatcaagaattatggagaagtactttgaagcacgaatcgtcttcatgatcataagtctaatctcttgggccagcatacttatcaactcattttgaatcttgggacttagataatgagaatatatctcacctgcaccaatttttctgatatgctctctcatcactacatcaaactctgcaatcatctcaataaaactcaaaaaattcccatttctgtcttcaccaatctttttattttctcctctaaatgctaagttatttttagcgagagtcttcactaatgcaatgatcctcactagtacttccctccaatgaatcttttctttgtttatttcttgttggacatacttatcaatcgttgttttgttctgtagtctagactctaactcagtccaacgagtcatacaaataatgtggtcatggctgccttcatgttcttcgagtcgcttcgaaagatttctccaatcattgtacacactagttgctaagtaaccacaactcttgtcatgtctaaacaatttacagcaaaaacaaaagactttatctaatgtttttgagtaaatcagccactttctatcatgtttctctccatttttctatcataaatcagtagaatccgtgagagaaatgtcttccaattccatctttagcaaaacgatgactagttgataaccttgccactggatctttttcaactattaaaactcttaatctcaaattcatgttatcccaattcgccggataagaaatattggaaggaatgtcttcattctatcgacttttcttcttttcaaagacaacttcagcttgttcttgttgtttattctcaaattcattctcatccacttgaaccacttcatccaaattgtccactttattctctggatccacttcatcagctcgttcttgttggttattgtttccatcagaattaatgacttcagaaattgtaggattttcaggttttttcatgtacctaagaagagaattagcctgtgatcttaccaactcttctcgtctcttttgcaattttcttttatcacatccatgaggttcctttttgatccctaaaggaggcatcgttcaaagtctcaactcaacgctctaacgtacgtcggtcgcttgcttcttcacggcagatggaattaatcagatttttaatggaggaaacctagaataagagaattggttgatgggctttagaagtcttgggttgaaaatcagattttttcttctcaactctcttttaattaagcctcgttggactttaaaatttttgggccctaagccaccgcttatatcgcttacgtcacgggccggccctgcatgattgtctcaatctatttctcatatggttggttggttggtaatttcaaaatttctgatgataacttgatttgtttgataattgccaggttttagcttgttatcaaaattgtgtctatgaattggctaatctaataaattacttgggttctgtttcttttttgtttacctttttgattattgacgatcatatttggttttgtttttcatcgattttgttttcatcatgtagtcttttcaatttgttccttttttgcagtcgactctgtcagctgtaaccaaaattgaaatcaaaactaaggttcatgatcacttattctttttcatccttttggaattttggttaatatgtggtgagattcatgtaaattagtttttttggttcttgttgttgttgtgtagtgaaagctagtacagatgatgtgttttatgagcttcaaaaccctagagagcagatccaagcttatgtgtttaatggtaactttttgcttctttcttgatatttttgttgttgttgaagaattagctctgtttacgattcttgatttgttcttgtatgttttttttttttaaacatagtggttagagctttggtgccaatgatgacgctagatgctcttttgaacaaaagtgagaagttgctaagtctgttcttgagtaatttgagaaggtataacatgttgttcattcgaaatctcattctattgagagattcttttgagagattcttgatattttatagtgattaaacatttgttgagctaattaatttgttggttttgaatctaatttttttcttttttttaaaaaccccaaattaatatactactattaatcatgccaaaaattaaaactcttaccaaactcttaactacaaattttcaatatcaattaataaaaatattgctaagagtcattgctaatagcctcccattgtggatgctctaagagcatcattattggggattgcttagattattcttagggtagttcataggtatatatataattaattttgaaatcttttatgttaagagtttggttaagaaattataattttggtaatatgcaatggtgagttcttagctttgagttcttaagaagaaaaaaaaatatttaaaaataaaaacattttaattttaaagactttaataatgattacaacataaattttgaaaacatttaacaatgtagttaatattttacactcacccaataaaaacttgacacatgtctagctcttagatttaatttttgctcttatataagagcaattcttaccaaagaaatcaattaaaacattaaatttctaatctaattaacataagaactagtctgagcttaccaataaggatgttctaaggggttctatagtctttctctctttcgagaatttaatccaagtcgttcacagttacgagtcgagggtaaattagtagttttacactgaaatatcaaccaaaaaatttcaaaattgaaaaatctccataaactgttttgcgacccaaaacaacatcttttaagcttctcccgcaaaattcagcaaagctttcggaggaatctcctaacagtcaccaccaccaccaccgtctaggtcaaatctcgtcttcctcacgctctatttctccatagaatatttcctaactcctcctccggtttatcgattttttcaatttttctagggtttcgcgccgggatctaaaaaatcacaatcatgccggtgagtttgactccgaacgcaatcacggcgatacatgacggcgacgtgaatttgaagccgttgttacaggttttagaaatcaaaatgataggaagaagtcaagagagaagccaggagaggtatcgtttcctcatttcagatggtgtttctgctcaacatgctatggtcgcggttcagcttaatgatcgagtcaagtcaggacaatttgagaaaggatctatcgttcagctgattgattacatttgtagcgacgttaaaggccgcaagtaatttttccattttctctctggttagatctagttttcgttgtgttgaattgcttagttttctagtgatctctgatttgttgcttagtaatgtttctgagtattcgtggctatgtatttggtttagtatgtgtaaggcatttgttacaatgagtttgcagaagcaatgatagcttcgcttttggtagagacctttcaatgaggtttcgtgtattgatgaatgattttggttaacatgtactagtgggaaagatttgtgttgttgtctttgtagttcatggtatttaatggttggtaggcagatgttaaggacaacatttaggatgataatggagatgattttgttgattgtgtgagttggaaaatatagttacacaattgttttggttgaacatgacatatttgaaggagttttgctctctttgattgtgattttcttatggatttattcatactgtgtacaggcttattgtggtgctgaacatggagacgatagtacaacagtctgaaaccattgggaaccctacaatatttggagaaacagatacagaagcccagaagacattttcaggtacgggcaatataccgcctccgaacagggttgtttttaatgaaccaatggttcagcattctgttaatagagcacctcccaggggtgtaaacattcaaaatcaagccaacaatactccaagcttcaggccatctgttcaaccttcatatcaaccgcctgcaagttacagaaatcatggacccatcatgaagaacgaggctccagctcgagtcatccctattgctgctctcaatccataccaaggtcgatgggctattaaggctagagtaactgcgaaaggagatatcagacgatataacaatgcaaaaggagatggaaaggttttctcgtttgatctgcttgactatgatggaggggagattcgggttacgtgctttaatgctcttgttgaccgtttctatgatgttactgaggttggtaaggtatatttgatttcaaagggaagtttgaagcctgcacagaaaaatttcaaccacttaaagaatgaatgggaaattttcttggagtcaacatcgactgtggagctttgccctgatgaagatggctccataccaaagcagcaattctccttccgcccaataagtgacattgagaacgctgagaacaataccatactcgatgtcattggtgtggtgacttctgtgaacccctcggtgccaatcttgagaaagaacgggatggaaacccataggaggatcctgaatctaaaggatgaatcaggaaaggctgtagaggtaacactttggggagaattctgtaaccgagatggtcggcaactggaagagatggttgattcagcttttcacccggttttagcaataaaagctggaaaagtaagcgacttcagtgggaaatcagtagggacaatatcttcaacacagctcttcataaatccagatttccctgaagctcataaactacggacctggttcgattacgggggaaaagacactgcttccttctccatctccagggacactatgcctggaggagtttccaggaacgagataaggaaaaatgtttctcagatcaaagaggaaggtcttggaagatcagataagcctgactggatcactgtgaaagcaaccatatcattcatcaaaacagatagcttctgttatacagcttgtcctttgatgatcggggataaacaatgcaacaagaaggttacacggtctggaacaaacaggtggctctgtgaccggtgcaaccaagagtctgatgaatgcgactatagataccttcttcaggtacagattcaagaccacactgggttgacttggataaccgcgtttcaagaaacaggagaagaaataatgggatgtccggctaagaagctttacgcaatgaaatacgaattggagaaggaggaagagttcgcagagattgttagagacagactgtttcatcagtacatgttgaagctgaagatcaaagaggaatcgtatggggatgaacaaagagtgaagatgactgttgtgaaggttgataaggtgaattatacatccgagagtaaatacatgcttgatttgctcgtaaggtaagttcgttctaggtattacagtgaggtatttcaattaactcagaatatgcaagctcgagtttagtacactattatattatgaattgatgaattctattgaatcttgattcaatgaagcttagtgttatgatttcaagtctcaatcgtctttcgaattcaggaaacaacaaatttgacttttatccaaaagttcattgctgcaacattgaaacgaatacacagaaggagaacagattacaataatgatgtaagaaagatatataggtcttaggttctcttgacagggtcaaagttggagacgccgacgacgacaccaatgatgacagtgaggacgaggccaccagaagcaatgctgagcaagaaattcttgagggaaggagagattccagaaccagcagcttcagctatctccggaatcaccatcgaagcagtaagagcagccgcggagataccggtcaaagccttgtccatcttgagggccttaacttgaagcctctgtgctctgcctccagttgcaaccaaagccttggatggtttcagaggtaatggcttaaggaaaggagacgaacgggtctggttaagtggtgtgaccaatgacatcgcggaggtagaagccatctcttccgatctctttttggtctctctagattgatctttctgagattctctttcgaaatgtgtgaagttgctgagaagaatggtatttgagaagagagatttgaggttagtgatgttcagagattggagatgtgagatatgaatcttacgtggcagcttctgagcttcctaatggctcattggatagataacgttatcttcatttgcgattactgtggttgctattgggcgtgaaaaaaaatatcgtacttcgagtccggttcgataattgacataaccgaattgagaggtgcatagtttcggttcgattctaacaattttggttctcaaatctctcagacccttaaattggtttatatacaaagtgtttgaacaataatcagttttataatatagggctcaaattatgaatttattacaaacccacccccaaaacgttaacacatcgtttgcaacatttgcctttgaaattgaaaagtgatcagcctcagtaatattatgatacagaaacaggaaaggcttcacatttttctaaggttatccaaccttgcttgaaggtcactatctatacctccactgtcctcagctccggtcgcctcagcttgtaccaccttgttctttgctgcgggtactgcgaccgcaccagatggagcattcaccagctgaaacatagatgaatcggtcaaatcgagttaagcatcttacaggtgggaaatagaactaggaatgttatagatggatacaatcaagttaagtaaaaccaaatctcacgtcacgcagtatcggtttcagttcaaggaagtttaagctatgataaggtccattctgatttggtctattgtgaatatctaacagctatggtaagattggttcgattgatccataagtggaataagtaaatggtagctaagatattgatgtatttacctcttggttgatgtcgataccgatctcgtcaaggacttggctaacaagatcttcagtctcttcttcttcctcatctccttccaaagcatcatcaatagcatctcccataacctcagacaccatctccattttctcgttctgcctctcaaattcttgcatgattttctgcagagatggaaggttcatctgcctgttcatttgccccattgctttagtcacacctttcatcgcctcacccatcgcttgtgtagatttcagagtctgaaataacaaagtgtaagtttatccccttgcaggaaaataagtaaacaattcgactcttggtaaaaataaagcatacctggatcctgagagatacaccttgaagttgagatttaagcttgtaaaacttctcaatctggtgccgcgttcttataagatcctttgccatcactttaacagctccctgtgagagaaagtatccaacaaatgtattcaagaagatgtccaactattcaagaatgagaagtaatcctatacatggtacctatatacgctacaaaagagaaacgaaccatttggccttgctttgcggtctttttaatctcgttaatgagtttcttttcttgtgtttgtaggccttgtctctccctctctatctctctgatagacttatccagcatccgcttgttctcccgcagaagttctgcaaccgacaaaatcattttactctatacatgattcaaaaccacacttaagctacacaaacaattgcactacatgtaacctaatgatctatgcacatgaaaacaaatgaactcataatcatcaaatcaatcaaaagctttataactccaaaccattttacttacactgagctatacatgattcaaaaccacatataacctacaaaaacaattgaacaacatgtaacctaatgaactcataatcaacgaagagatcatattcctcagaatcaaacctaaattgatctaatttcaaatcaagtataaaaattacaagatcaaaacttgcgatcatcgaatatttcactaattacaaactcaataagcaacacagatccgacaagagacgaaatcgagagaaaggaggataagaacctgcgggagtttttcgctttccgaagattgaattcatcatgattcaataccgaaaaaggtgaacaaatctgggacttttgtagaagcttgaacgaaattaaggcgacgaattagcaaaacctttgatcggagttgaaaaatcgagattatttttatatagaagagacgaagcttccttcggtgagagatacgaaacgcgtaaaggaatgatttttttttttcttccttttttcttgagaagtttttttaatatcaattatagcaacaatctttctcataattaacattggagacctcttataacttttggacctccttaaaaatatcttctttttaatcatactacgatgatgttcgttgtgaagatctcatccggatgaaccgttcttagaacatgggcaatatagtatcacaaaagaattttttaatattattattttttctttaactcaactttcattaattagaacgtatgtaatcagtgtgaattaaggatgaaatacatctggggacataatagaagaacataagatggaaaaaacccaaaaagaatttcaactattttttatttggacgtttaatatccaatcgtttttggtttgaagataaatacacgaagtaataaaactgtgcaatttaacacccagacaattaaatgttgttattttcatactcacgatctcataacaaaaataaaattccaattttacccttaacatctcaattaactattaatttttagatggtatgatattaattttataattttagataaaaattaattttattaacactttagtttatggtgtctaaaaatttaaattttcattttcattttttataactattttattttaaaatttaacataaaaattaaagaaaatcaaaattatattaaaatagtcatttttacaatcttattctatcgtcacaataccaaagagtcgttttctctttgaaaaaatttaaaatcgaaaattaatctaattcattgagattcaggttaagattagctattttgctactaaaaacaaaattcgccatttttatgaattgataaattttgagaaatacgatgagattcaggttgagattttgtcgaaaataatttgattcatgaaagatatacaatcgaaaagagagtttctcactaagaagaatgtttactgacaattttaaaatatttttgattttctataatttttatgttaaattttaaaataaaataattataataaaaatgaaaatttaaatttgagagaccataaactaaaatattaataaaattaatttttatccaaaactagaaaattaatatcatatcatctaaaaattaatagttaattgagatggtaagggtaaaattggaattttatttttattgtgaaatcgtgagtatgaaaataacaacaattaattgtttttgtattaaattgcaagattttattacttcgtgtatttaccttccaaccaaaaataattgggtattaaacatccaaaaaaaaattagttgaggatttttttgggtttgttcttgaacataaaatcttgtctattacgaagttgtatcttggctaatttgtcagcaggttgaggctcaatttgtttctccatccagatggatcatttaggtggagatgaaaaatgatgtttgtttttgacaatttaacagatcatttgaatgaatcatttggatgatccatttgaatgactttgtaagtttaggcaaatttttaaaactcatttggatggacttaattggaccatttggatggagattgtttagtcaaaatgaataaataacaaatataacctttgtaataataccaatttctataaatttgttatttaatattttttaaaattccatattgcaccaaaacatctaaaaattaggaaatcacgaactattattttacgttaaaattgtatttaatttttccaccaaaaccgcaaaatcatattttcccgacaacaacgtaaaatcatgtttttccgccaaaactgcaaaacatatttttatctcaaaaccgtaaaatcatattttctgtcaaaaccgtaaaaacatgtgtcccaccaaaaccgtaaaatcatgttttcccgccaaaactacaaactcatgttttcccgccaagaccgtaaaatcatgttttcccgccaaaacccgcaaaagcaaatttcacaccaaaaccgtaaaatcatgttttctcggcaaaaccgtaaaatatttttccccgccaaaaccataaaatcacattttcccgccaaaattgtaaaatcatattttcccgccaaaatcgtaaaatcaatgcaagctcttattgtccatctaaactccacgtcggcaaacttgttcttccaagctttgatgtcatgcagccaattgagaatatcaaatcgattcacttttccatgtaaggcatccaccaaaatcttgcaatctccttcaaatattattcttgtgtattcgtgaccccagaggtgttgcattgcagaaattagtgatttacattccgcctccagtgaatttgaaaccggcagaccttaactcttccccgctcctttgtattggtcgtgttcattccgaataattcacgcccctgttgatctttgattttgtccggtaaagcttccatcgtagttgcatttaatccatcccgcctccggtctctgccatctgtgttgggtacgagtagagtgcgttcctgccagtgttgttcgactatccccttggttgtggccattcagtatccactcctctgtatcttggtatgcgtttcgtagatccttttgccaagtgttactctctcgctgaaatatgaccttgtttctactcttccatatgcgccataatatccagaagggtagctgtgagtgtagagattctcgaggtacttcttggtgccattcaaatagagccgtcattttcgtctccaagctgatctgggaatcagtgagttcatggatgggtattgccgatgcccgccaaatttgtattgcatgagggcatgtgaaaaagagatgatcagtggtttctgtttcagagacgcagcgtttgcaatatttatcaaggttgatatgacgaattgaaagtttgtctcctgttccaagtgcacgagaaagcattcgccaaaggaaatgtttgagtttaggagccgttgtggttttccagatcttgttcttcaattggggttcgcctgctggggggcgagcttgaggttcttcatcagggatatgagttgccaaccaatagccagacttaacggtgtatgaacccgtctccgtgtagtgccatcccaagtaatctctgttttgtgattgtctgagctttgtagtaaggatatatggaacatcttcttgtatgacgacttcacggatcaatctttcattccagcctgttcgatttggtaagaaaaggtcttgaatggatatgtcacgatgctggtgatgggggtgttgtcttggaggtcttggaggatgaagtggtaaccatgggtccgtccaaagattaatagaatcgccattacctactatgtatctcaccccttttttaagaaggtctctaccatgtaatatagattgccacccaaaagatttttgagatccagtagcattaaagatattggaattatgaaagtacctccctcttaacacacaggccattaaacactcgggagactgaaatattctccaagcttgttttgctagaagcgcatcattgaatttggtaatgtcccggaatccaagcccaccttctttctttgagaatttcatacgatcccatgcaacccaatgcatcgagctcccatattgtgtagatgaccaccaatattgagcaatgatgcgctctatctcctcacaagtgtttttgggaagcttgtagcagttcatagtataaaccggcatagctagagcaatagctttaagcaagacttcgtttcctccttgagaaataaatttattccgccatccctttgtcttctctctcactttcttcactatgtgttggaataactttatcttcttccttccaaattgttcaggaaggccaagatatttattacaaccaccctcattgtgaatttgcaacgttctccggatgttcgtcttcatagtttcatgaactctttttccaaagtgaagtgcagatttccttgtgttgaccatctgccccgaggctctttcatactgagttaaaatgtccttaatagcaagacacgacttcatatttgcttgaaaaaagaatagtgaatcatcagcaaaaagaaggtgactaacagggggacttttattacttatcttaatccctttgataagaccttgagcttcagcctttttcatcatgtggctaaggatctctgcacataagatgaataaatatggtgacaaggggtctccttgacggatgcctctttccggttggatgaatccatggggtgcgccatttatattgacagagaaagttggagttctgacaaaagtcattatccattcgatccaccggtagtcaaatccaaacttaaacattgccgcctgcaggaaatcccattcaagtcgatcatacgccttggtaatgtctgtcttgatcgccatgaatgaattagagcatcgtttcttcacttttagggcatgagttatttcatgagcgatgattacattgtcggtgatcacacgccccagaatgaaggctgcttgttcttctgagatgatgttagcgaggtgcttctttaatctggtgacaagtatcttagagatgatcttgtagcttacgttacacaaagcaatcgttctatagtcactctcgtgtcgaggattttttggttttggaatgagacacaggtttgtgtgattcattgtcttatcgaagatgcccttctcaaagaagttttgtacctcctgtagaatagtatctttgatgtcctcccaatacttatgataaaaagctcctgtgaaaccgtccggaccaggcgccttagatccgcttattgagaaaacaacttctttgacttcttcttctgttacattcctgattaggtcagcattcattctcaaatgactcgctgctggaaaccatttaacacatggaaatgattattctgtggtgtgagctcactttgaaatagtttagtaaaaaaatcttgtgccacttcccctatgcgattggttcccctgtgtttcgttccgtcatcgtcatgaattgagtacatacgattccttgccatcctagttttggtagaagcaaagaagtactttgtatttcgatccccacctgctagccatgtcttacgacttttgagacgccaaaattctttttcatttgcataagcctttgagagttgcagtcttaaatcccgaatagtgtgagttgtataaccatccgtgtgtgctttatcaagacaattcttaagaagagctatgtcttcctgagcattcgtacgatatcttcgtttccacttagagatttctcttctacagtcaataaggtgtgtttgaagactgtcacccgcattcctccgcatccacctccgtttgactgcatcattgaagccatcttgatcaaccaatcttctatcaaagcataactgattgtacttttgttacaagtcactggtgattatagtaatcacaggttgatggtctaattcaattagctctagaaactccatgtgagatgctgggaactgtgtcaaccattcattgttaaccattgagcgatccaagcagcaagcaacgtcatgggagtggcgtttaccaacccaggaaaacgggtctcctatgtgtttgagatctttgaaatcacaaatttgcatcattcttctaaaatctgtgaacgagctctctagcctaggatttccacctttttctcatggttgcctctgatttcgttgaagtcaccaattgccatccaaggttcggttctttgagttgctgtacgttataatctttcccaaaccaagtgtctatagattggatttgggtgaccataaacacaagataaatagaacccaaatccaataatattaacaaaggtatctacaaggtttggggattgataaagaactgaaacagaaacacaatttttccacattaaagcaattccaccacttaaaccatctggtggaaccgttacaaccctatcataccctacatcactacacacatctctgacggatgtcatctctttgcttagtttccataaggacaatgatgtccggagagaacttcttcttcatctccttcagacgtcgaactgcgaggtcattgcccagtcctctacagttccaagcggttgtcctcatggatgaagaggtgtttctgggcccaccgggcctctcctcacgtcaatcaattgaaccgttgcgccggaacagtcactgctttcacctatctcacatcaccaccttgtttggctcgctatcctcaccttcatccagcgaatcctccctctttcgttttcccctatcaatagctggaaccaggggagcgttcgccaaatccactccattgaacaagtccagatccgactgcaacactgactcagcagttggatgggcagagctccctgggatgtctcttgtagcgttttcaaaaggaggaatatggttaaacaattcacttgtctccatctcaccattaaacatggaatagcgcatcgcttccatgtcttgaaattctgcgagagcatcatgatgatcatccatatcttcctgttcctcatcttcattgtgtctttctagctccaggactccatttggttcatcatcattgatttcacgaatgactacgcctgggttgtgatgttctgcaggaggaggcatgtcttcattattatcatcatcaaagtgctgctcttcgccaccattctgcaggacacatgctccagtgtcatgagtcagcaagccacacacctcgcagaagcctcgaagacgctcgtaacggaacctgagcagggtattttcaccggccttgaactggaaatgtctctgaaatcgcaggggaagttggatgtcccagtcaacacgaactctcacaaattcaacacgggctacaacctctgcatcgtaatccacgtccaagaggtttccaagagaccgaccaatgtgagaaatgacttctcgattgaggtagtgaaatggaatgccacaaatctgaatccaaaagggaatgaaattaatgatcggttgattttcaagcgggttcgggttccaatgctggagaatgagcatcctgtcattgaaagcccaaggaccccgtctcaccaccaactccaacgattcttcactcgggaagatgaattggaattgattgccaccaacgatgcgcccatgaactagtccggacagtccccaaacacgcggcatcgatgtgatgattgatctcagattctgtctcctgggcatcacgggatgacccatgagaaggaaacggtgttgcgacgccgcatttcagaaatcgtggcagttgcatcacgtagtgggggaagccacaacatggagataaccgtcgcacaatcggagtcgcagaaacgcctcacgacgtcgacgaaactatccgagaaccaagtcaagtaaccgtccaaccaaatctaaaagtaactgtacatcgccctcgcaatcgctctcgcaagcgccatctttctttcctcagtagttaactttttattgtaagcatagtttttctttaaacataataattttttcttaatattatttataatatttatttacttttaaatttttttataatacttctaataaatatgtttgtattggtgagaacgttttaaataccataaaaaagaaaaaaatacaaaattaaaaattcatatattaaaacatatgattacaaaagataatggtaatgattggttagcctcagtggcgaatccatgatttattttaacctcaggcacaatatttttaaaaaatgatattcaaaaatactaatataaaaaaatgttttataataaaatatatctatagagctatcatacgattttccatactctgaaatcttttgatcactaccttatttatcaccgtatcaaatagttctcttttaactaaacaaaccacatagtcgtttagaaactgatcacttatacggttgcgcaaagtagtcttcacaacagtagcagagaagcatctttcaacagtagcagtggctataggtaaagtcaaaactaccttcaaaagtcgataaacctgaggatgcgaaaggtgtttccttgtctcgatcataacacgtgcaagatctcctagactcttcaaattagcaaatctgtcatcttcccgaatattgtcaatgtaaagaccaagctgatgctcgagtgatctccaatcaacacgagtaaaatcttgtggataaaattcagccaatctcataacttttaactgatcaaactcacgaaacaaatcagtagggcttaaagaagcaacacaaccaagtaattcggtgtttacctcatcgaaacaatcattatactcctgaatttgcatatccaatacagtgtaaaaacactccacttgataatgatgcaagttggtcatgttgcttttttttcttggctttcttggatcaacaaattctccatccataatgacaaactcaatgtcatgatccttacaagaagaaaaacttcattaagaaaagaatcccatccatcatctctgagattgaataaatgttgcttggtggatttcactagtgacatagcattcagaatgtcttggtctttcctttgtagagccactgataaactatttgtaaatccaagaataagcaacatcaactgtaagtagaacacaaagtcaaaggtattaaagtacttgagaagaccattagcttgtcgtcttttggtactatcagttccatcatcttcgatccactcaagcattttaatgataaaagagaataaatcaactaaccggaataatgttgtgtagtgagtaccccaacgagtattaccgggtctctatagtgaaagttgctgattcaatccttttcccgtcttaatttgaccttgattgattccttcctccagctttttccgaaattcatctcgaaccctatcctttctcttacaagaagcttcaaccacatttatcaagacagaaatcatatcaaagaaatctccaatttcaaaatgttttttagcaactgccacgacgactaactgaagctgatgcgcaaagcagtggatataatatgcagaactattttctctcaaaattagatatctcaacccattgaattcacctttcatattacttgcaccatcatagtcttgtcctcttatctgttttatactcaatccatgtttagcaaacaatgaatcaatagcacatttcagaaatgcagaaaatgtttccttaacatggataagaccaataaatctttctttcactgtcgcatgtttatcaacaaaacgaaaaaccactaccatttgttctttatcaaaaatatctgcagattcatccaccatcaagcaaaatacatcatgatcaacttcttgaattatagatctaatcacttcctctacaaagcaatgcactatatctctttgaattttgggacataccatctgattattctttggagcattctccaacacaactttacttacaacctcattttgccctgcagtatatttcacaagctctaagaaattccccctgtttgctgaatccactgactcatcatggcctcgaaaaggtaatccttgtcgtactaaatatctacaacaatcaattgaagcgttcagtctgattctgtattctccttttactatgtcatcttgcttataaaaagcatgaacaattgattgaccttgcctcatcaaacaatcagccctttttaatgcattattgtgaaagctattcaccaatcccacgtgttcgcgtaaactctgaggatttttccaagtatcgaaacctttcgtcgcaaacgtatcacttccacttttattttcaaggtaatctctaaacaagtagcaacccaaacagtaagctttatccttttttacactgtattccaaccaaccactatagagatcaaaccagtctggattaaatcgtctcattttttttcctgatagtgtttaggaaaatcatgtccacgaggttaataaggacctttaatcagatatttaggtcttaccttatctctttcattaggatgatagtccaaaatatgtttcctatcggcaggatccgaagacaaatcttctagaatagcttctggaatattttttggaatatgttgtgacgttgattcatgatttcttttgaaaaatctatgaattgttccctaataagaatagttatatcaacatattagaaaccaaatttagattaaaaatttgttaacgaacgaattaatcaaactacaaaaaatatgtcttgcataaataatcataatgaataatttgataaaactaacagtttcgtttcgttcggtctaccacagttttaatattagttaatcaaaaaagagatacttacgttagacatggtggctggaaatttgagaagaaaccaaaaagataaacaattaaaaaacaatttagttgacaaaagaaatctaggtcaattgtttgtttccatcgtttattcatttagactgaaacaaatttttaatgggctattgtgttttcaattgttatgagctggaaaacattataagagtagggcctttttttcccaatggaccaatagataattaaattattgaattaaatatatgaaaaattttttttttttttttaaacaatgtcgggcacgtgcctaaccttattttgatgtgggtccgctcctgattggcctgtatctttatggtacaactccaaaaaatcttaaagctctaattttgaaccaatcaagctttagctttcctaaaaaatctcaccgcccaaaacaattttttttagcttttttagctgtaactcttaaaatttctacaacatatttttgtgtgctttaagagctgtagacattttttatataataacacttaattatctatttataatatttttattaatataagggggggggttattgaatcaaagaatttattagaatctaactgaattgaattggggagataaattagagatttttaaggaatgtaaaaagattttaaaaaaattattctggtagattttttggtagaattatttttaaagcatcgtatctgttcatccaaaaaaaaaaagcatcatcctctcaatgaaaccaatagtcaatgacccatcaccattgttgatccattccttcttactgttaggtctatgtttcttattaatctcattcacagtccattccatcactaactccatgattcaatctctctctgcttccatcattgctataattgtatctttatatgatttcaattatactttctgttacccaaacgattctatttattagatctatcctcaaatccaagctaaaatcaaataaagaaatcacaaaattctcgtatgattaataacaagagaaatcatatctgaatatgaagaaggatatatgagatttcgtcatggccgacgacgacgtgaaacaaaaaaaggatggcaatttcatttgagaccctttctatccaaatctccacctaaaacctaagaaattgttctttccattttacattagaatttctattaaattcttgtcaaattattttgtcatacaaaaatacaaaaacttgaacaacacttgctttttatagaattcagaaatccggaaattgaataacaccagaatttaaaaaaattaataaaattacctcaatgaataacaccagaatttaaattcaattaaactctgtcaaattccacagtttaataacccccctaaataacataaataaaatgtgacacaacaatatatatttcattttttttattataaaatttaatattataatatatattttcatcaaaaattgtataatgaatatatgatacttattattatgaaatgtttcatttttaatcatattttattttgcaaaattttaaaattcatatatttaaaatttaaatctataatactgaattaattttaccaatcaggctttactattaaaaaacctacagaaaaaacctacacctacagcaaacacagttacagcaaaataattacagcgaaaattttacttctacagccaaaccaatcacccacaatattacaataaaaaaatatagaatatacttaagcaaaataaaatttaaaattgaaaaacagaaaaaaaacatgatgatataaataatttagtcgcttgtagtaaattactttggccttatttttgccaaatatgttcaatcaaatcttttttcaattgtcgatgtgtttgttcatgatgtatttgagctcgattggccatcaaattgttcacatttgtagttgtgtctgtagaaaaagagttgtctacttgagaagtcccgcttccttcgccttctacgaaatcagataaatcaaactgagtatattcgtctcgtttatcttctataatcatattgtgcaatatgatacatgctctcattattttgcccattccctctttatcccaaaacagacctaggtttcaaataatagcaaactgagcctgcaagactccaaaagcacgttcgacatcttttctcactgcttcttgacaactagcaaataatgatgctttcggtcctcgtggacgggtaattgattggatgaatgttccccacttcggatatatatcatatgtgaggtaataacccattttgttttgatgtccattgatttcgtacttgagtcgtggagctcgaccttctaatatatcatcaaccaccggtgagcggtcaagaacatttatatcattacacgtacttgaaccccaaaaaaagcatgtcaaatccatagatcttgaaatgtcacggcctctaaaataatagtggattttccatgtccgcgtgaatactgccctttccaagctgtagtacaattattccactcctaatgcatacagtcaatgcttcctaccattcccggaaaaccgcgttcttttccaaaatgaagtaaccgttctagatcctcacgtgtaggtcgcctcaaatattcatcttggaataaatttattatgccatctacaaaattctctagtgcttgactcatagtggttgcgcccatgcggaggtatgcgttcatcacattgtttgcaagaccatatgccagacgcctaattgcggtagtacatttctgtagggcggatagaccttgcttcccagtagcatcgtccctttgttggaaatatgaaaattgagaaagactttgaacaatacgaaggaacaacggcctcgtcattcgaaagcgtcgtcgaaacatgcgatcatggtaaatggggtcttccgaaaattaatcgttgcataatcgaatatgactttcttcgtgatctctctctatattagcatcccttttttttcctttttttcgccgctacacgtctactaaaattatctaaaccatcttcaaaacatttttcaaacatctcctccaacgtatcatcatcatgagaatgtgatgccattattattcaaaagagaattgggtttgagaagaaaaacaattaaaagagaattggatttgtgaaggaaaacaattaaaagagtcttgtggtttgtaaatgaaaataaagtctttgtttgagaataattgtaatgaagaattgtaatgaaaatatgagaagaggaagaatcgtttgaatggatttcaatatgagaagaaagacatatatataagagaattgtacaaatacattgagaaggaaaagaaagaccatagaaagtaaaaacaagtggcttctgaccataaaaacattcatatgtcatgtgctactaaaaaacaaacaactagtagccctacattacatccaaaacaactactaaaaacaaaaacaaggtacatccgaatatattacacaaccctacattcaagcatcaataccccacatctcctttccttgccgacatcactagcttccaagaggaagtcttgcacataaaaaagcaaagaatataaaataataataaatgttaagttaacaaaagaactgaactaacaacacatacctaaagaccagaatattcattctcagaaacaaacacattgcttccagaaagatactcttggataagagaatttttaatttgaatttccatatcactcaatccattagacctattaagtaggctgtcaagtagcttatgtttggagagtctctctttgacagtcaaatccttctctttcacttcccacatacgctgaagttaatcagcagaaccagcgtcagctcctccttcactctttcccttaccttttgacttggctgaagccttggctgccttcacacctataggccttttaagactttcttgttctacagatgaaagtttagctttcttcttggcagaaactttgatcagtcttgaggattctccaaacatgctcaaggatgaatttgtttttttgatcttgatggtaaagcttgtaggcaagcacgagaatgtcatattgagtctctcccctgcgaggagtccgacaggcaaactcataacagcctgcaaagttcatgatgagctgagagaagagagaaggtcgttgaagcgaagaccggagaagtgaggccctcgaggagatgcaatggaagagatgaagcaggaggagaagcagagggagtgaaggcaagatcgagagggaaaatcggcggaggagagtgaaaatcggcagagagggaaaatcagcggaggagagggaagttctaggttttctcgggagagagaggtgagaaaaactgaaaggtctttttcctctgctttagccaaaacacgtttctaacaacaatcagcacgtgccacgtcatttgttattgggtatcaaaaatatcaatcaagtgctaagacttagacccaaaaatattgttttatccatttaaaaatatttttgggcttttgatactaaataaatatcaccgctgggcatggtcttaggttcaccaaataagggtgaactcttgtattcactttttttatttataaaattttgaacactttttcgactcacctttagggtgaaccgagcgagaggaaaaatcggcggaggagagggaagttctaggttttctcgggagagataggtgagaaaaaatgaaagtttttttttttcctctgttttagcaaaaacgcgtttctaacaacaatcagcacgtgccacatcatttgttattgggtatcaaaaaatataaatgaagtgatatggctaagacccaaaaatattgtttggtccatttaaaaattttttttgggcttctaatactcagaaaatatcactgctgggcatggtcttaggttcaccaaataggggtgaactattgtattcactttttatttataaatttttgaaaacttttttgactcacctttagggtgaagcgatcgagagaaaaaatcggcgggggagagtgaaaataggcggagagggaaaatcggcggaggagagggaagttctaggttttctcgggagagagaggtgataaaaaatgaaagttttttttcttcctctactttagccaaaacgcgtttctaacaacaatcagcacgcaccacgtcatttgttattgggtatcaaaaatatcaatcaagtgatacggctaagacccaaaaatattgttttgtccatttaaaaatattttttgggcttctgatactcagaaaatatcaccgctgggcatggtcttacgttcaccaaatagggctgaactcttgtattcactttttttattgttaaatttttgaaaactttttcgacttccctttggggttaaccgatcgagagggaaaatcagcggaggagagtgaaaatcggcggagagggaaaatcggcggaggagagggaagttctaggttttctcgggagagagaggtgagaaaaaatgaaagttttttttttcctctcatttagccaaaacccgtttctaataacaatcagcacgtgtcacgtcatttgttattggtatcaaaaatatcaatcaagtgatatggctcagacccaaaaatattgttttgtccatttaaaaatatttttttggcttttgatactaaaaaaaaatcatcgttgggtatggtctttggttcaccaaataggggtgaactcttatattcaatttttttatttataaatttttcaaaactttttcaactcacctttagggtgaaccgatcgagaggaaaaatcgtcgagggagagtgaaaatcggcggaaagggaaaatcggcggaggacagggaagttctaggttttctcaggagagtgaggtgataaaaaatgaaagtttttttttcctctgctttaaccaaaacgcgtttctaacaaccatcagcacttgccacgtcatttgttattgggtatcaaaaatatcaattaagtgatacggcttagacccaacaatattgttttatccatttaaaaatactttttgggcttctgatactcataaaatatcaccgctgggcatggtcttaggttcaacaaataggggtgaactcttgtattcaatttttttatttataaatttttgaaaactttttcgactcacctttagtgtgaaccaatcaaaatacaacaatatgtaatatcatactttatttaaaaataaatcaaaattaaaatcagaaaacaaataaggaaataaaatctgtatattttgaattgaaaatggttaagtatcagtttgtgtttataaataagaatttgggtttagatttgataattaaacaaaattaaatatcggtttgggtttataaaaacgtatttagagtttagattttactattaaacaaaattatatgttggtttgggtttataaaatagtatatagggtttagattttacaattaaacaaaatcatatgtcggtttaggtttataaaagagtggttagggtttaaaaatttagaattaaatgaaattagatatcagtttggatttaatgaaaattgtttagggtttacattttacaataaaacaaaattatatgtcaattgggtttataaaaataaggtttagggttttacattttataattaaacaaaattatatatcgatttggatttataaaagagtgattatggtttagactttaaagttaaataggattatatgtcgttttcggtttgcagagattttatttccttagtttgtgttgttttctaattttaattttaatttattttaaataaagtgtgacatgacatattgttgtattttaattgattattaaagatggagtgaatgaagttggttcacccctagagggtgaacccaagaattgttctaaattttatcatgtcatctaacacttcaaatttttttttaagaaaatagacaaaaaaataaagtaaatcctcgacaaaaataataattaattagtggagtcgagtcgttaagaaaacaaattaaacggagtcgtctcttttctttttaggtttttgattttgtggtcactattacgtgaattgttttcaataacaaaatattcatgtaactctctgatttaaggaatatggtggtacatacggagaaggtttaaaaaaattgatttggccaccgatgtcaccaaagtgcacttatcttttcggtcacacgtcctaagagaactccatattaccttccgagaaatgattgtcggaaccatgcgaatgaggacaaagcatggagaaagattatgtggtgatttgtagggatagtaacaagtctttaaagcctctcgtacgtgacgcatcgaccgtcggacaaggtgggcccatggacccgagagaggaagtgtggcccactggtaggggcggtcggggcgttacagtaaaccaattttatcaattgttttgttttgcaattttgcgatttttataattttacagtaaaccaactttatcactttctataattaaagatcatagagaatattcgatggttaagctgatatttagaacattcttatatcttaagcgatatactttccctgattaaggaagaagttaccatacacttcagaattgtatttgttgatattaaattaaatattttacgtaaaagttaccatataagtccggttaggtttcattttccttatataatcgatctgaaatcgaattgaaataaaaagttccaattagataaattacctgtaaattggcttaaattgaagaagcttaattttcgatttaacctaactcgtttagcgaatgtacttctcttttaatagtatagagattccaaacaaatctaaaaaagacaaaaaagaaagaaagtaattttgacataagcagagattgacaaacaattcttataaaataattaatgttggagaattctaaacaccaaatgaaatatttatgaacaatgtccattagatgtgtagagacagttttatcaattccatatttcaaggtttgttgttaattgtataataattctagacaacattctagataaagcaaaaatattagtgcaagaatcaagatctttcttgttttggagcctaggttgaaaaagtggacctaggacttgggctatgatcggtgtgggagaaacattcaaacatgacgcgataagaaggtgcctcaaaaattttacgaataagaaggtgcctagttaagggtgccaaagtttcgttgaagaggaggcccaagttcgtggtctttggtttgacgggagattgttgggtacaaaccaaaagtcccacatcggaagtttagaaaaagagtttctaagatataagtcaagtccaactccaactagtatgaggtcttttgggaaggaacccaataacaaatccttgcaggcttgaacatgtaagtctaaagaggacaatatcatactaaatgggagttgaaatgagcttagaaagcccattatagttaatagaaatttcatacttttctctatcgtcccaaggacttggatcttcttgaagaatcttttcattttctttttatttcgaggatttttatattttgagccaataggcctcccacactttaactgaaccttatgttcattaattttgctctcatctaactccagctctctaagaatttcaactcttgatggggcatttgcagcggggatatatgactttgtcacctttttgtatcggcgaatgaatctggtaattgattttccatattttttaaatgtacaatctttagtacttccagctcacgttgcttcgtagaggggggggggggaggattaagatattttaaagatggtgcacaccattctatatttttatgcatatgcatttgatgaattacttcccttaaagctgggaattcatcttcatcaaaatggcaatcggcaaaatgtgccgtaaacgaatcaccagtttgtggttcaagataccttattatgctcggtgacacataaccgacgtatattcccaatctccttgttctttgtagcggtgctataagcacatataccgcatatccaaaaatgcggagatgggataaatttggtacttgaccataagtcatgtgtaaatgggaatattgattatctgcgcttggtctaatctgaaccaaagccgcaacatacaatatagcatgaccccatataaaaattgggagttttgttctcaatattaacggtcttgcaatgagttgcaacgtttaattaatgattcgtccatgccattttgtgtatgaacatgagggaccggatgctctacatcgattcccctcgatacacaatagtcattaaaggcttgcaaagtaaattccccaacattatcaagccagactttttttatggcataatcaggaaagtgtgcctctaacctgattatttgggcaataaatcttgcgaaagccgtgtttcgtgtagtcaaaagatatacatgtgaccatctagtggatgcgtcaattaataccataaaacatcgaaacccaccatggtggattggcccacatatatcaccatgacttctcgacaagaattcaggtctttcactcccaattttgattggcgatggtcttattatgagtttttcttgagaacatgttttacatgaaaactcacgagatttaaatattttcttgtttttaatggatggttttagaatttttcataatttttggcatcatgactgaatcaggatgtccaagtctttcatgtcatatcttaaatatactagtaaactcacttgagtgattgtcactcgagtttactgtaacatttgatgcgattctatttatttttgtgcaatataattcgaaggataacattggcaattcttctaatatatatatgcatctcaaaatttatgcaaagatattcaatgccaactttattgatagtctctatatgatattcattacttcggatatcttggaaacttatcaagttactatgagacttaggagaatataatgcatcatttactttaaaaggagttccccttggcattgtaaaaatggattcgccgaagcctaatattatctttgcatggccatatatagtactcacgcttctaccagagtcttttatttggagagaggagaagtattttgtatctttagagattgtgtgtgtagaagcactgtccgtcagacatatatcttcatcctcaatctcgtattttgaaatgattctgggataaaatatttattcattaaattttgacataggctatccacatgtcataatatattatagtaaaatgaaagtgaagttgtcaatatcggtgctaaaaactaaaacgcatcgttttgctctgagggcgaaaaaagggcgaactagggttttaagcttcctccgcaagttccgatgccggagacaacaaaaacaacgatcagcatagcggagaatgttcgatgcagggaatgacttaagtcaagtgttgatgcgggatgagggggttctgcagattttggagaaggaaatgagttctactgagattacgttgcaggtgggaaatattgatttggagaagaagcagtacctgctcgtaaggtggagtcaatagggaaaccacatgggagttgggctgcggtggttaaaaacaaagttgagtctaaaatagtggttttgattattgaggaggttgatggagtaccatcggctcgaattcccgatagtgttttcaaggaagctaaaccattatgggaagacttcttagttggaaagttcttggcaaaggctccttttgttgggggtattcatgctttagtgaataagatatggacacttggagataaatcggtaaagattgatgtgtttgtggtgaaccacacaacagtgaggttcagaatcaaagatgaacgtactagagctcgagttctaagaagaggtatgtggaacctgtgcggagttcctgtggtgctatcgaaatggactccaatagttgatatggatcaagaagagattaaaactatgccactttgggtaatagtgaagaatgtgccaccaaagtatttctcttgcaaagtgctaagtgctataacaagtccattgggaacgccaaagaaactccacccggatacagaagcaatcaaaacttttgaggaggcaaaagtatttgtagaagtggacttcacgaagaaattaccaaagtgtttctctttcaagtcagaaaaaggaggagatacagtagtcgaatatgtttatccatggttacctccaagatgtaacagctgtgatagatggggtcatttaagtacagattgtttatcaaggaaaaaggcagaaaatagagttgaggtaaccaaaccagtagaaactaaggtggcagatctagagccagagacaagtaatggtctggaacagagtttgaaagaaaataaagaagatgggaataataatgcagaggagttaattgagaactcacaacaccagtccaaggatgctctgacatggaatactcctactaaaacaataaagagtcctagcaaagccaacgaactgcgttatggagaagtgtccatcttgtccaactcttttttctgtcttagtgacaaaggagaagaagtagaagaaggagaagtatatgctgatatagaggtagagaaatcagaccacgtagaggataagggggatgattacgtggtggaagaagaatcccaacaggaggggaaaactttacctactaataattaggaagaagcagggaatctgaggatatctcttccgagagcatctaaagatagtcacaaatgcgtctcatcaaacaaaacgtagaatactaggactcaaaaacctagttttctaaaaaaacgtcacactccaaataatcattgatgtcaggtttcttctggaacatcaggggcttcaataaaaatagtaaacaaggtgttgttaggaactggatgaaggaggggaaatttgattttggatgtctgatagaaacaaaaataaaggcaggcaaagcggattgaatagttagttcagtgtttaaagactggtctctactatctaattatgaagaacatcgattgggaaggttgtggttagtatggagaagtaatgtcagggtaactccactctacaagacatctcaactcatcacttgctcaatacttgtagaaggaagagatgaagaattctttgtctcttttatttatgcgtcaaattttgcagcagagagaaaattgctttggagtgatcttaggaatcatcaagactctcctctctttcaaaagaaagcatggcttatttgtggagattttaacaaaatattggaaggcgacgaccactcactttttgcgaccataccaacaataccacaggggatgcgggaccttcaggacttagtgagatactgtgaactcactgatctgagctatcaaggacagagatatacttggtgtaataaacagaaggagggtgtgatttgcaagaaactagatagagttctggttagcaaaaatcggattcaagattatagtcagtcttattctgtttttgagtcaggtggctgttctgaccacatgagatgcagatttcatttatcgaaagaagggatgcgggttaagagaccatttaagttcgtgaacactaccactgaatacacgggttttcatatagagcttgaagaaagttggaagaggagtcctccactttttcactcaactgctgcaatgtttagattgtcaaagaagctaaaaggattgaaaccccaactgagaaacatggggaagaagatgatcgggaatatctctataagaacaaaggaagcgtataagattctttgtgaaaggcaagctgctacaatgtctgacccaacagagcaagctattattgcagaggaaaatacatatgagatctggagtaggttatcggagatagaggaacgatatctacaacaaaaggccaaactccattggatgaaagtgggagatcagaacaataaaacattctattccgctgcaaagctcaaggaagttagaaataacatcatggagatacagtgtgaagataaaactgttgctgcgaatcaagagagtatcaaagctgaagcagagagatacttcaaggaatttttgtctataaaacctgcagattatgttcaatggtccacagaggagcttgaaaacattctgcaattcaaatgtgatgaacaagacaaacacatgctgataaccgaagtaacggaggaggagataaaaaaggttctttttgcgatgccatcaaacaaataaccaagaccggacggtttcacctgcgagtttttcaaggaatcttggtctatagtggggaaggattttgtggtagctatccagtctttttttaaaacaggatttttaccaaaaggagtcaactcaacgattttagccttgattccaaagaagaaagaagcgttggtcatgaaggactatagacccatctcttgctgcaatgttctctacaagataatatcaaagattctcgcaggccgactaaagatgatcctcccgaaatttatagcacctaaccaatgtgcttttataaaagacagattgttcatggagaatctcttattcgccacagaaatcatcaaagaataccacaaagaatctatctccccccggtgtgctatgaatatagacatttctaaagcatttgactcagtccaatggggatttctactcaacaccttgagagctttagcattcccagagcagtatgtgaaatggatccaaacttgcataagctctgcatctttctctattcaagtcaatggagaacttgcagactattttaacagttaaagaggtctccgacagggattctctctcagcccatacttattcgtcatttgcatgaatgttctctcgcgcaagctagacatggctgcaaatgaaaaacagattggctatcagccgaactacaaaagcatgaaactcacacatttatgttttgcagatgacttgatggtatttgtagaaggcaagaagaagtccatagaaggagcctagcggtcttcgaggagtttgcagttcactcgggcttgaagataagtcttgagaaatccactatctacatggtcggagtagacacacatataaaagaagatatccttgctcaattcccgtttgaacagggatctctaccggtccgttacctggggctgccactaatgacaaggaagaggtcctctgctgattacttaccgctcctagagaaaatacgttcccaaataagcatatggactgcccgtacactctcctttactgggaggcttcagttactcacttcagtgactttcagtttgataaatttttggactgcaactttcagactacataagagttgcatcaagaagattgacaaaatttgctccgctttcctttggtctggtccatctttaaacccgaggaaagtaaaggtagcgtggtctactgtgtgcactcccaagagtgaaggaggattggggctgagatcagtagaggaaacaaataaggtttgcatgctaaagctgatttggagaattctctcagcaaaaggctctctatgggtggactggatcaaaatgcatttgataagaggtggctctttctgggcggtgagagaaacaagttctagtgggtcttggatatggaggaagcttttgaagtatcgagaaacagcaaagaggtttcataaggtggaagtacgaaatggtgagaaaacatccttctggtatgactcatggtgttctttaggctgcctatatgacaagctcggagatagaggttgtattgatatggggatcccgaaagaaagtactttgtctccagtaatgaagagaacaaaaagaagaaggcatcgacaacctgttttaaacactgttgagtgtaagctacaaaaacagaaacaaaaccgagtagaaacaaagaaagacatcgctatatggaaaggaaaaaacgattattacaaatcaaatttccgatccaaagaaacatggttgcagctcagaaacacgaaaccggagatgtaggggcataaggagatttggttctcgaactcgactccaaagtatgctctccttacttggttggtggtcaggaacagtttagcaacaggggagagaatggggcagtggaaacaatatgcaaatactagctgtactttctgcaaaactcagatagaaacaagtgaccatctcttctttcaatgtgattactcaaggaaagtttggaatggactggtacgtgggctgctattggacaaatactcagaaaaatggcaagatataatgctaatgcttgcaagaaaagacttcaacaccacaaagagcttcatccttggatatgttttgcagaactcaattcactcgatatggagggaaaggaacgctagaagacatggcgaggaaccgtcacccgcggagagactaatcaagttaatcgacaaaaacattaggaaccggttgagtacaatgcgaagaggaggtcaagagaagtatgaaaaggggattcaaatgtggtttggatcaagaagaacatcttaagagttctttaatttttttttaagacaagtctacatgtatatgtataaacgtttattttttcttgaatataatttaacattagattcaaaaaaaaaaatatattacagtaaaacattatcccaaaaacaaaagcatatataatgtttgtcatgtatagcataattatacatatggctataatatattacattgatttatcgttttcatgatcaatcgagaaaatctgccataccaaaatgattggcctttaaaggaaggtcccgacttatcacgatgagattagtttcaacatccctttcttttgtcttttgtgaggcttgatactgatagactaaatgttttggtatacgacacgtcatgtactagtgtcctttcatgtcgcatctgtggtaagtgctttcaatataccatttcttaacacggccaacatcattcacatgaagatttttgttggttttttctgtgttgaaatcattgtgatggaaacttcttccttttcctcgaccacgaccacaacctctcccatgaccactaccactaccacagcctcgccaaggtctggatcctcaccaattatcatcaccagatgtagcaacattcacttctaaaagtgaagctgatccaggtgggggagataaatgattcatcatcacgagttcattatttttctcagcaaccaaaaagacttgcatcaactcggaataacaagtgtgtcctttggcccaatattactggtgaaggattacaattccaggatgaaacgtggagagcgttttttcaatcatctcataatcgctcactttttcaccacataatatcatcctaaaggtgattctaaacatggcagaactataatcaccaacacttttgtaatccaagaaccggaaatatatgtgtatcatttttgagtgaattttttcttataggttctaagacacaatacttatagcacatattagataaattagcaaatatatattaagaaaaaaatggaacatacaaatttgaacaatttgcaatcgcgtaaagcaacaataaaggaatataagtttggaaaaagttgttgagatcgtatatatttcatgtaatatgtaacattaaatatttagtgtccaaaagaataagacttttgaaagcatactatgatggattaattacgagaaaggaccgaaaaaataaaaacttacaagatcaggaactttcgtatgtacttacaaaacccgacactttcatctttgcaaatagaccgttctacccttcaattataatatcgaagctaaagaataaaatatgcgacatctctgttgtagacaagagggctcaaatttattgcggctgtccagtgttggcttctctgttacctcatcgttatcgccttagttttgttacgcatccaacacggccagagaatttctctgattcatcaacaagcgggagattttcccttgatctacttttgtatgtaccggatgtttcagaaagttgattccgtttctccccgtcggccatgtccgactgatttttacccgccatcatcgattcatcaataaacgtaagattcttcgtcgatctatcgagattcagttccgtctttgattttgtgtttactgtctaccatcagatctacttgttatcgaattctgatgcgtcgatctacttttgcatgtaccagaaattacagaaacttgattccgtttcaccctatcgtctttgtttggctgattttcattctccatcatcgattcatcgttaaacgtaagcaccttcgtcgatctttcgtatttagtttcgtccttggtttgtgttcactgtatactttcagatctactttggttacttcacaagcatcttgttgtaccgttattgtgttaacttggatagtaccaagcacttatgttatgcacggttttgcatctttcagttcagtgaagatttagtaatgtagtctgatgcagacgaagtttaccaatgtgtatcaggttctatgcatccccaaattcccctgtttatgactatgtccccttggattcccacattagtatccattagggttttagttaattgcgtaaattactcaattatatgcattcatgtaaatgtgttacttatactgttgtgttaactttactcccttgtgttcccaaattagtgtccattagggtttagctttcatctgttacttagagttataatattgttagtacctttgtctgtttcgcctcccacagtcgtagcataagggttttactttgctgcgtaaaaagctgacacttatgtatatattttgttagacctatgtatccaagcacttctctgttgtaggaacttacgacttgtactccatctttctcaggtgaccttcctcctcgcttgcttgccctcaattgctacccttctcatcttgtctgcatcaactcatattcaaaggcaaaatatattattgatatttacaatgtcttgtatggaactcctgagttagaacttctgctccagtctccgcttgggtcaatttttttgcttcctatcaggcagtgttctttgtctagtcagcttctgcaccagttactacgtaggcagctgtttacatctgaagttgatgcaacctggtttgtgtttgcaggacagccattacggttttctttgcaagagtttgaggaagtcacaggtttgtgttgttctaaatatccgtcagctgctgaagtacgttctactacttcatatgatgatggcgaatctccttacttgtacaaactcattgagggccaactcggtttgacgactgtgaaatcattggttagccgtctcaaatctgattgtgccatgtcttcttggcgtaaattccaaatatctcttgttgttattgttgaaggtgtctgatataggttaaattaatcctaagaccactctctcaaataaagaggtcagttgcagcactgagggatcgaattcacaaagttctcggatcacgcaatagattaaggttttgaattaagctaagtaaaacattaatgaaaataaagagaaacaaaagtaaacaatagcaatcgattggatggttgtgaaacaagataataaatgcgtcaggcttaaggtattctcaggagataaatgatagtagatctagaaatagctaagttgttatcgaaccgttcttgaaaacaaactatgattttagagtaaccggtggcgttccgcgaaactctctatacttagagctaagataaccggagaagccgagaaatcatatactaaagcatgcattattatcaagtctgattagttcacctagtatctaaaccagagcccttctatgagcctacctgttttttcttaaatgcctaggctcatctatgatggatctaataacaagtacctatggcgggcatacctattatctaatatcaagttctagttagctactctagaactagcattaagaacaatcaagatgaagaatcctacagataacctagcaaggggcaatctactaaatcatctaaatccctaatgaaaaaccctaaatctaacaggaaaactactcaagcatgatgaataaagcaaacaacatgattagaatagaaatcaatgaataaaacaagagaagaatagagttaagaagaatcttctctaaagggagtctccacagggttttgctcccaaagtacaaaagagatagaaaatagcctctccaagcttagtctaaaacaatgacctaataaccatatatatatgtctcaaaaacgtgttgggccttaattaaacataggagaaagttctgggccgaatttggaaatcttcaaaacatcagtaagttgcgtctcgaaattgccgtcatgtattggtgtcgttcgacacctacgtccattttcgtctccggattgcttctgcagcttaagttgtctgttgatctccagaatgctccataatctctaaatgcatcccaaacatgtaaagacctgaaaaggactagaaaagactgtagaaataacaattagactctaaaacctatacctaaaacattgttaaaaacagtaaaaatagggatatatcagtgtccttctaagtgcgtcccaacatgtgcgtccatatgtcgaagtagtaaagatggttaagaatgttgattttttctcaattatcctttacattgctttgtaactttctcatgcatcgttcatactgacacattgcacacttgttgtctcacataccatttacactctcacatattctttacataagtctacatttataaactgtttgagtttttattggaacacatttcatatttcctaaaatgtcttatcactttcaaatactggaacacacaacttcttttatgacccataattgtttccaccaacatgactgatacccccctatataaatttctagcaagacaagatatttacaaaaagaaaaagatagaaaaccttgacctcaacattgctctcgacatcgcagcacgtgttgggcgtgattcagttgttgatcttgctggcatgctatcaacctctacgtattatcgcttcctctctgcccaccctgatgtgctgaagactgtttctttgcaaaccttttatcaaaaatgccgcccgttgtaatcttctcttcaccgctcggcctatctttgcccgatgcctcgaagattcttatcattcagctgtataccttgagagcctccgcctggctgcaagcgagggccgagtagaggaaggatttcacatgttacgcttttagcaagcagcacagcgaaccagcttcccacctgcaaccatgttcatgttgtctctatttcagactattttaggtttttatgatgatggcatatcatcttccccctgtttattgacttcattggatcttatgctgcagctgatactgtagcaacctctgtttaccgccaaatattccaaattgaccctcttaagattcgcttcaatagtgacacctggaggtttgatgatatccctgcatgtattgctgacggatgcgctatcgataatcgttgtataaattgtttcctttactggtactcagttatgtaccttatcctttgctaaaattgtactgtatctattgttctcctttttccattgtaatgtatttgtaaggccttaatctttttttcccctgcctcactagttgcttatgacttgtctcttccaatgtttaatatctgtacttgttttattttgtcctccatgcaactgtaacttctgtcaattgatgtcctactatttaagtcaagctcttgatagatgggctgctgtctttcactaacttccccctactacacacaactgcctttaccgcaccctcacttatccatttactgtgccacctacaccattcaatttgtcactaatccttattctttctcaaactgtgtcaactacatcatttattgctccacgcttttgcgttcaaaactgcatttctatttattcctccattttccttttcactctttataatgattgaagaacacaaaagtatccactctcgcataagaagatgacttacattccacagcctatcgccaccgacatcgtccgccgtgttggccactctggctttggttttctcagacctttcattgctgctgtgccattttggcatgccacaactctctcacccgaagtgttttttgatgttgatattgatgagtttgttttcaatagtcgcctgggtaatgaaggttcaccatttcggcccttcctgcttcaatgtttgcagctaggtcaccatactgcatagtattttgaaggcctccatcttttggttcaggaaaccctcacgcaagcttcactagacatgcttgagactgcaggaccacatagcatgtacgctcggtttgcttttgcaatcttcctcctatgctgcggtgtgtgtgtatcaataactttctcaataaggtattgataagtgtgtattttgcatgttttgagcatccatttgtcatcactttagcatcatatcatcactgttttataccatttctcatcatttgtcatcactttccatgtttaggataggtttgcatgcattctacatatttgtgttgatttcaggtgatttggagctgttaacgagctaactggaagaagcggacctaatcatgacaaaccacttgacccagaggtcgagtaagagcttcaagatctcaagagaccagtcgacccccaggccgagtagaagacaccaccactcgatcacatcactccacccccaggtcgagtgacttcatctccatcttctgaccaccactcgatcacatcactcgacccccaggtcgagtgacttcatctccatcttctgaccaccactcgatcacgtcactcgaccacgcggtcgagtgtcttcatcccattgccagaccactacttgacctcatcactctacccggaagtcgagtatcaccatcacaccactcgactgcatactcgatgacaagcttcaaagccttcttcattctgcactcaaccagacactcaagcacaaagaagaagagaagactccagctattcactcgacctctcactcgaccacatgggtcgagtacagttcttaatccgtcccaatacttcgtcgttttaagtattagggtttcggaatatttggctataagtagcatgtacttcacatttttgcagacaagaagtttttacctagttttattccgcagaccttgtgttctagactttttgtaatccggatttctctttatctattcagtattcagtattcagcttttgttcttgattttcgtttactgttgttcattctgttatcatcctgctgttacactgctgttatcatgtcttcaacctgttcaacgtttatgctttctgttatgttgtctgagtagtgaataggtttctgaggatgggttagagtagtgtagaattctcagtatgctaggtgattgaatattggttgatagatcccttctggattagttgttcttaatgcctattgctttctgatcaactggattttgagcccagacatttccgcgcccaaaaggtattcgatgaaatgtctgaaccactaattccagagattcgtgaccctgtaccaaggtattggttgcagggagcgttttggctttaacttgttgattcgtaatgcctgttaggttagctctcgtgaatggtgattgagtctgggactaggttaacttgagagtctctgttgcggtggcacttagatttggttaatgaacttgttgtctagggttaatttattgagcatgtcaatcacttgtaaactgataaaacgaaaccactcaattaccccatcctcgggaattctttatctgattgattttattgtttactctactgctgtttactgcatcctgtaatctgttgcttagtttctacaattctttactgttactcgacctgatactcgaccactcagttgtctggcaacagactgtgcagtcgagtatccctgttacattatctgtctgttactcgacctgtcactcgaccacacccagtgctctgcaacaagctgtgttggtcgagtgtttatttgtttctgcttgattttctgttttctgcatgttcacttaggactgctagaacgcaccaaaaccggttattgcttggcttgacttagtgacttctgatcacatcttgattgttagcatcacacccatttggattgacaacctaaaatactacaacgataagattggtgtttaggataattgactaaaaacctattatcaggtatcaaatttcactgaagcacttgagattacaaacctcattgaagattagattcgttagatgggaagccgtgggactaagcagtaccggagactaatgcctttaacacgagccttttccgcttcagctctttctaaagcctctagctccctctgatcaacctcatcctcagagtagttggcaaagaaatcttcctcgcatcttccatcaatgtctgtactcaaagatggcgtgcctgcatcagctggacttataatcccgccatatctaaatcatggcaaacatcatacgcaggttcagtccacagagctttgtcgtgacgcctaattcctcgaaaaagccactcctctacaccatcaactgcttcaccatttgtctctgttgttggggcactaacagacttaaccactgccaactcaacatgaacgccctccacctcacttgaaaagtatttccctgcgccatcatctacgtcaccattggtctctattgttggagcagtaacaaactgaactacttgagactcaacacgaacgctctccagctccctttgaatgtatttggcagttccaaaactttccccaagctcacgcccatcaaatttttggatgtcgccaccaacactaggctcaatagagtggcaaaaatttaaatgtgcctttgtatcctttacaagcaagaaacctttcggcgcgacagtgctatttaaagctactggaggctttttagacgttgaaaatattgacagctgctttggaagccagtaacttaagttagtaatccaagcatttgcatcgacatgaaactcaccagctacagccgcttcgagctcataaaatgtcatatcagaattaacgcatatgctcctggcaaatcgatcattttctatcacaaatcccactttccttgttgtgaacattcccactttccagctatggcaaaaactggaacatcagcaccctgcaacaagcgataaaaaaaacccagcaataaacatttgaacttcatttaaaacgactagcaataaaagtacaaaagggtagaaaagtcaattttcagcaacaaaagtactctttttcgaagtacactggcaaagtacctaaattcaaagttttccagtttatgaggaggataaaatagtaaatgttatttctgaatattaccaacaaatctttacctcaattcctggagaaaaaaatccactgtcaatgcaaccctaaaaccatgtatctcccaagttatgaatgacaaactcatactaatgccaactccttgtttctctattcatcctgacaaggccctgggtcctgatggcttctcagcgagtttctttcaatctaactgggacaatatcagcgaccaaatcatctctgaagtccaagctatctttattacgtgtcctgccaagaagaatcaatcacacccatgtcaggttaataccaaaggtgccttgcccccaaaaggtttcagactacagacccatcactctttgctctgtttattacaagatcatatcaaagattctagccaagagacttcaaccagttttacatatgtgtatctcttaaaatcaatcaccttttgttccccagcttgctatatctgataacgttttaatcacccatgaagctctccattactttaaaacctcaggagcaataaaacgttgcttcatggtagtgaaaaatgacatgagcaaagcctatgacaggctagaatgggactttatccaggcagctcttgaaagaatgggattccaccctcgtttgattcaatggctaatgcagtgtattaactttgttacctattctttcctcctcaatggtcaggctagacgactagtcacacctgaaaggggaatcaggcagggagacccttatcaccatacatcttcattatctgcagtgaagtgctgtctggactgtataacaatgccctcagccaaggtaacttaattggcctaagagtttccaaacgcagcccacatattaatcatctgttgtttgtggatgatacgatgtttttctcccgctctgatcccaaaaactgcgccaagctgaaacaaatcctccacaagtatgaccaagcttcaggacaacaaaccaatagagagaaatcctctattactttctcctctaaaatagctcctgaaacaaagactcgggttcaggcagtacttaatattcaaaaagaaggtgggaaagggaagtatcttggattacctgaattgttttgtagaaagaaaaaggatcttttcaatatgatagtggttcggattaagcaacgagctctgagctggtcctcacgcttcctttccactgcgggtaagcttactatgcttaaatcagttctttccgctatgccatcgtacaccatgtcctgtttcaagatccaaacaatctatgtaagagaatttagtcagcacttactagattttggtgggacacaaaaactgaaaagaagattgggtatcttggaaaacaatgacaaagtcctttagagaaggagggttagggttcagagatattcaaaccttcaactctgccctcttagccaaaattagttggacactgctcaataacccttccttcttgttggctaaggtccttctaggcaaatattgcacttcatccaactttctcgattacatagttcccaactctgcttctcatggttggtgcagcatctgcttcggcagagacctcttaaaacccaagttggggtacctcattgactctggtacgtctattcccctctggagaagtccttggctctccatgacctctcctcaagcccctatgggacccccacctttgaatcacatagttggactgtttccaatctgttattgtcggatgcttatgtttggaataaagccctgatccaacgcttactgccagcctatgagaaggatattctaagtctgaaacccagtaaaagatgtgcggctaataaatgggcttggcttcccacaaaagatggatcttatagcaccaaatcggggtaccatgaatccttctctgaggaggagacctcacctacaaccccagtggttttgcagcaagaccattgcagttggaaatctaatattttgtccttagctacctccccaaaaacaaaacttctgctattgaaaatggctcaaagagcacttctgttggcgaaaatctatcccaccgtctagtcacagactctatcgaatgcccacactccggaattgctgacacggagcttcacctgtccatttgtgacacagatctggaatcaagctccattcaaagaaagtctgaaccgaaacaatctagtgtccatcaaaaaaggtatcatgtgtgctaagaaccttacttgtcttcctccgtctgggattggtaatggtcctctctttccatagatttgttggatcatatggacttcacgaaatcagtttatttttagtaagaaacaaatctcagcaaaggatgcacttgttctagcaattatccaggcaaaggagtggtagtaggctcaatcttctaatccaatgatcagagctctccccaacccacccctccaagccccctcacccgacaatctggttacctgctttactgatgcctcctggaaacctgagaataaagcgtgcttaggttggctcttcaaggattggcaaaattgcatcgtccgacaaggctcgactctgctctcttttgttccttctcccctcatggccgaagcactggcaactcttactgcgattcgcgttgcaaatgaattagctttcatccacatatctttcgcttcagactcgctcacacttatcaaagctcttaacttgaagctccaattgaaggaacttcacgggattctccacgatatcctatctatctctgctcttttctcattttgctctttcaattccatttatagagagtgtaatcgacaggctgatgttgtggcgaaagcagctctattctgttgtacggatgcctgattcaatataagggttttgttgttaaaaaaaaaaaaaagataaaagtaaacatttgtttgtaaaaaaaactttttcacatgtgttgtccaaatctatgggatagcacacgtctaggggtttcatgttacgaagtgatatcatatagcatctctttctcgccactctaatcccatgtagtgaggttttgatttttttccaacaagtttcatccatggtggtgtctttaacccattcaagttggctcatataggtttttccctcttcactccttcctctacataataatagcatcacatatatgtagattgcttctttctagtctatgtagtgtgataataatacgggacggtatactacagatgaaatagtagaaataacaatcaaaatacaattatacaatcttaaacactaaacaaaacaaacaatagtaacaaaaacaattacaacttcaaattcaaaattttagaaacgcatcttaatttttttataagaagatttaacattataaacatttaaactttacacgactgctcaaatcctagaattgacgatagctgttatattaatataagatgatatactacgggtgaaatcctataattaacaatcaatatactattatatagtcttaaacactataaaaatttaacaatattaacaataaaaaacttttttgaagttttaaatattataaatatttaaactttaaaataattaataagaaatttaaaaattataaacattaaaactttatactacaggtgaatcctagaattattgtatttgggtcgataataataccagacgatacactacggatgaaatccaagaaataacaatcaaagtataattatacaatcttaaacactaaacaaaacaaacaatattaacaaaacaaatacaacttaaaattcaaattcaatttttttttctaaaaggcatttcaattattttataagaagtttaaatattataaacatttaaactttatacgatggctcaaatcctataattggcgttagttgtgtttatattaataaaagattgtatattatgtggaaaaaccccgaaaaaaacctcaactaatttttatttggacgtttaatacctaatattagttgtgtttttggttggaagaaaaatatacaaactaatacaactaggtattaaacgtccaaataaaaattagttgaggttttttcgagttttttcccgtatattattgaaaaaatcctagaattaacaatcaatatacaattatacaatcttaaacactataaaaatttaaaaataataaattaaatacaacttaaaatttcaaatcttataattatcgtctctcagtataccatacactagagattgacccacggtacaccgcaggttgatatttttatgagaaagttaacaattttattctaattaatataatattaaaataaaacatacgtagctcttaatataagaacttctacatcaaacacaaaaacaataaggaaatcaaatgaaaaaagaaattttaaaattatttacaaatggaattataacaaaacttctttttttacatattgaaaactttcaaaaatctgaaaaccaaaaattctctttataaattaataaattattaatttatcgataaattaataaaatatgctggtcccgacattattaatttatagaggttttactgtatatgtatattgtataaggtatgtttgatgtatggatgtctcccaaaaaaagaaaacataaatgaaaaagataatagtaataaaagacaataaatattcttttggttaaatctaaaaacgtaaagtattcttcttctccaactatacaaaacatagacatcaaatttcttcgtcgatcattttccttcgtagattgataaagcttagatgatggtaaccaataaagcatgtcgcaataagacgaaaggattagcagacccaattgaaaactgaatcaatcgatgatcccccgattcaaaatatgacttctccaagaggtatgagaaaatcagggttgaatgaatgagttacaaagaacaatcagtagtcgagtttggtgctcttaggtgatgtgaatgaagagtatttatagtgtttagataaaatgataagtagctaaaatcttggtgagaaagtttggaagatcttggaaattatcgtcaagatgataatttcggaaattgtttagtaggaatatgcttgaaatatgctttagttttatgattgtgtgctggtaaaagatcctcacatatactcgttcaattataattgaaaacaaaaactatcttaccttattaggaactaattttcgagactttggcaatctaattttcgagacttgagcaaagagaaatacatatatagttagtgtagatacaatctaattgttgagatattttcttatatttcaaagtaaatatggtcgataatgatggaaagaaataatggcaagtgattaatgtttaatccatttgtaaaatctcgtaaatgtaagatttcattagcattaaaaactaaatttctttttgaatcaagtaattccttagcattaaaagaatttattcttgtaatattcttgtaattgataacagaagaataaattttggtaagatatcattagcatttaaaactaaaattatttttcgaatcaagtaattatagatatggttagttaagattaattaggattctagatatggttagttaggattgatttccgaattttgctaattaggaaataagcattcattaattttgtagagatttaagggagtgattatgcaatatatttaagtagtacttaataatttccatgtttaagcaagttattagtgcaatatcttaattgttcatcaaaagtttggtcattgtcctaaagaaaatattttatctgattgaatttgtagggactaaacatataaatagaaaattgaataaggatttttcaacccaaaaaactgaccaaaaatgtatatatagatttaaatcaaacaaaacaatcttataaatttgaaacataatatacaactatttcatgtagagaaaaacattaaaaaaaattaggataactacaattacatataaaaaattaaatttaaaataattttaattattatactttacgtaatttataacaaataagaaaatatataataaacacgaaataatgaaccataaaatacactgctttatataataattcgtataataaacagcagatcttaacaaaacaaaatcaaaccaaacacatactaatataacattaaaagtaaatctatatataaataaggtgataaattaatataacttgattatataaatatagatgatattgaattgacaaaataatttaaatcctaacgcaaataatcaacatgcggtataacgcgggtcaatatctagtttatcaaacaaaaaatgataatccaataaaatcaaataaaactcttcaaatagagagctgactaaaaatatatataaaaatttaactggattttaaagtttatttcttagttaaaattgaaaacacataaataaaagagtgttacttcatcaaaacaaaaatactagtactgagttagataaatatgcacatctgcatactatcccctatcaatttttaaaccgtttttctcaaaataaacatataattaattattaattacatgtggcgtaagatacattcacatttaacgacaagatattttctttcctttttaacttattaagtacttataccagttttagatttgggacaaaaattacattaaaaacaaaaaattaaaaattaaaaactatgaaaaagatataacaaaaatacaaacgagaaccaccagcataccttatgtgaagcagtcctcaaacctcatagcaaaaaggacacttgaagcttctccaaaatctaacgtaaaaatggaacctttagagaagacataatcaaaccagatggcatgtgagcaccaacgaacaaccaaagttgtgacaataataatttgtaacttttttttgcttcagagtttggttcatttcctccactttctatatctgtaaacgactgtatattttctctatatgcgtcttgaaccatttgaactgtgtctaccgcctcttctgagattgtagattcttcatccctatttggaacatttctactactactacccacttggtatgtatcactttccccgtgattataccagaccttgtaactcggcaatattccatctttatctaagtgggaccacactatagccttatcaataaatgaattatattacatactcgacaaagacaaaacatcataccactttctaagcaacacgcctgatttgttgctaaggtcatgaattccatgaggtcggccgcatactctgtcgtcagcaatgagttagaagcaaatcgctccttatccatccatgcccgaaaacgatgcatatttttgctcggataataaataaataaatatattacaagaatacagccgatttgcgagagaaatttgcgtggcaattgcgacggagttgcgattcatttgcgagacgagtagcatacctcgccaatccctcgcaaatttgcgaggaaattctagaaggcgaaagcactttttatgggattttgctcaaaccagccgcatctcagaaaatcctaaccttaatctctgattctcttcttcttctacgcctctcttcttctgcaacaaatctctcttccttcttcgatctgatttcttcgtcgctgcctctcttcttcttgtccgatatgtattcttctcggccgcgactcttcttctccagcacccaccgcaactcgatttgaaacacctcaaaggtaacgtcttcttctccgatctaagttattcttctacaatctaacttcttcttctcgatctaacttcttcttcttctgcgatctatcttctctgccgcgactcttcttctccgatttatcttctccgctgcgactcttcttctccagcagcagccgccgcgactcttctctatttttgtttcgatctgaaactcctcaaatgtaacttcttcttctccaatctaacttcttcttctccaatataacttcttcttcttctccaatctaacttattttttcccgatctaacttcttctacataatcgatctaattcaatgtttttttttgtgcaagatgcccacgtcggagaatactcatgcacggtttagggcaacaacagcgtgaaccgttgcatgccaatgctcctttcagtgatgggaatatcttaggagttcagggttcacgccatccaccatcgcctccaacgccaaccactcagccttctgtcaatcattctgctcctccacctaaggaactcaacaacctgacattggaggagctgcttgatagtctcggtcgtgctggcttgacaagactagacccaaactgtcctccgataacttttggtaaggttaaattcatagatttatagaacaacttgtaaaatggatttagcattatagtgtcttggaagtttaaagaaatataaatttcatgtaggtttatagaacgtttgattgctcgtgttgtaggtttgaccaggaccctgcagttgcagcaacattccgtagcatcttcgatgtttctgcttgttttgttgtttggtttcatttctgatatgtgctcttttgatgtttctgcttgttttgttgtttggtttcatttctgatatgtgctatgtctattttgtagcaagtatataactgggaccgttcaattaacaaaagactgaaagggtaaggattgagtttgaagcaaagctaaaggataggatgactgatcaagtgtcacaatggaagggaaagtggaaggacaagggtgatgatgccaagccaaaatagattgatcctaatgtgtgggctggtttagttcggttttggcaagatccaaagtcagatatcatgatccagatggccttggcatatataaacaccgttccggccagacctcatagaaaactcgtgcacgaaaacatgtaagataagtattcttctctccttaccattatttaatctacaatgttatattgacaacttctttatatgtttgtgtttcagtgtgagaagaccggagaaacaactcctcatttccttgtcctattagatgagacacacagaaaagcggatggaactgtcatcgatggaaagtcagaggagatctacaagaaagtgacatctaggatagaagaggaagagtctcacatgtgttaaggggacaatatggagagcactggatcaggtggattttctgttcatgccaagaacaagatatttactgaggtaaattttctcttaccattcagtattgtgcttgttggcttataagatatcattgtatctttagtccttagtccgtgtgttgtgtatggtgtctgaaatgtttgtgttgtgtctttagtttttggtataagtttctcgtcatcttggcagctaattcattatactttgtgttgtgttgtgtcttaattgctgtcttttgtctgtttactcatgcgctttgtgttgtacttgtgtctgattagctttgtcattctattggttttgttgttatgttgtgtctgaattagtttgtgtagtgttgtatctgaattgctatatcttttgtctgttgtcttaaacgctttatgttatgtacttgtgtctgattagctttgtctttctattggttctattgttgtgttgtcttgtgtctgaattactttgtgttgtgttgtgttgtgtctgaattcttttgtgttgttttgtatctgttttctcatggtttttgtgttgtgtgcttgtgagtttttgtgatctttgtagggtgctccgcgaaagaaaggaaggatttatggggttggtctctgcagtttgaagcatcctcagcaattgcaggtccactgcttcctcgtgatgatccggttctactttcttaaaagttgtctgccgctaaagcttgcattcaaactcaggctgagaagatcaacagcttcgatatcctgtttgactatcttaccgacaaggatccagctttagctgcaattctttgaggtagttcctcgacagagacataaaaggtcagcgcaaatgaagcacatgtggttactgctccagtaccgcaactctacaacgagacgacaactgctgcgaccctagctaacaccgcacgaggatcctctccatcagcaatattttaaaaccaatgttttttttcttgttatttctatcacaaaacaatacaattctcaaatgtttaagttttcaaacagtacaattctagtatacattttaaatttacttatgaaatttcagttttcaaatgtgagttaatttgagaagcagaaatcacattaagctaaatatcaaattaatttgttaatttgggtctaattaataagtaattaattagaataagataattagagtctagttcaacacaaatcaagccataatagaaaagaaagacgttgccgaatactggcaaatccatcgcaaattctgctagggatttgctaggagataaaaacaatatcgcaaatccctcgcaaattttgtgaggcaagtacaagaaagtaaaatgcaaggtgttttctaccgtaactttccctcgaagtactagatcaaacaattgcaaaaattttgctaccatttatttccctcacaaagtgcgtgtggttttgctagaaataatttccctctcaaaattgcaagatttttaccatttgcgaggagcgatttggaaggaactcgttgtcctcgcaattgccttgcttcaacccaattgcgagggattagcggctaattcatccctagtaaatcggctttattcttgtagcgtatatatatatatctagatattttttggtgagaatatataatattttggtattttagaagggaatgtttttacattttttgggaattgtacgagtgaatgattttgtatttttggggagtgaggtttttttagaaaatgttaaatggactctgaaatagttttatataagatttttttttcttttagttttcctaccaaaataaatactattccacctacttaaatgaaaaatgttttttttttacctaattatatatttcctccacctagttgtcaaaaattcgtttatcacatttttaagaaaccaacgattttcctacgaaacttttggtaggaaaggctcttacgttattccttcggttctcttagaaagttattttcgaaggaaactgatgtaacgccccaaccgcccctaccagtgggccccacgtcctctctcgggcccatgggcccacccctgtccgacggtcggtgcgccacgtctgagaggctttaaagacttgttaccgactctacaaatcaccacatgatcttttcccatgctttgtcctcactcgcatggttccgaaaatcacttctcggaaggtcatccatcctgaaactattccagctcaagcacacttaactgtggagttctctcaggatctttgaccaaaaagataagtgcactttggtgacatagttggccaaatcaattcttttaaacctctccgcatgcaccaccatattcctaaaactgggtgttacaattcatccacactaacagatggcaacgtcctcgttgcacaacaagatcgtaacccccgatggtgcttgccttctttattccacactcatctgggttcggctctgataccatttgtaacgccccaatcgcccctactagtgggccccacgtcctctctcttccccatgggcccactcatgtccgacagtcggtgcgccatgttcgggaggctttaaagacttgttaccgaccctacaagtcaccacacgatctttccccatactttgtcttcactcgtatcgttcgaaaatcacttctcggaaagtcacccatcctgagacaactccagcccaagcacgcttaactctggagttctctcaagacctttaaccgaaaagataagtgcactttagtgacatagatgaccaaatcaattattttaaatctctctggatgcaccaccatattcctgaaaccggggtgttacaactggaaagaacagttcctacgcttttcctttgagtctcctttaaaaatagttttgtaggaaattggacgaaaatgtttccgactattttcctaccactatatttcctttcgttttccttctattttcctacgagatttcctacgatttcataagtcgtaggaaattgaatagaaatttccttcgaaaaactgacgaatattttcgacggaatataaatttggtaggaaattggaaggattttggtaagtgttttgtcttacaaaaatttggtaggaaattttgtcggaaaatacaatgttttcttgtagtatatagccacccattatcatcttttgttttatttgcagatgatttagatgtcttttgatttccttttcctgtgatttaatttaagagttgtttgagaagaagtaatctaaaatttgtttagcatttgtaacatatttgttagtttttatggattgctgtcgaattttaatatttataaaaatattattagacttggtggtaaatcatttggtgtattgaaagatcgtttataaccaatgtacctttaagctttccagtagctcttttcgccaatagtattgcatggagcatttgtcaggtttttctttgttcctctacaaatatataatattagtattgttccatttgttaaatgtagtttactattatttgccgacgtattaacttgaatacccaaaaaactttttttttatatattttatttatatatgtatccagaaaacttagtttatagtcgtttggttttcctcggcgtacactgatgtttgacatgtaaattgtactctgaaatggagaatttgtataggaataaagtaagtttgtttgtttattttttaaagtagtgatcgtaaatgcattatttgatactattattgagagatggtaaccttactttgtctttgattggtgcattgtggttcttcatgagtctctttttttcttttctttttagctgcctgagttgaagtttgtaagtagccttttctcttacctaaaggttctcgcttcatgatttttaattgtttttttacttgatttctttatttcgtaccatcagtttgtggttttatttggttttcttatgagattgttgtctttagtgtaatgatgtagtaaaaagcttgtaatagtgagacgaattcttttcgtgttcttttgttttgtttagtataagttttaagtataaccaatattaaattctccacattgttttttagttaatgagtggttatatcctcgatagattaagggtcttgtgatttagatgttttacgttacacatacgaatttattgtctttggtattaatatattttcaaaaactaataatattgaactcctcttatttctaagaaattggagtctttgggaaatcttttatattaggttgtctttattataatccggtagatatgtttttaatggaattacatgaatacatttgtcaagttattccttttaattatttattttaacaatattataatagctacttgacaaatcgtaattagttaaattccccaatgtcttcagttttttttgggttgcctctttggaaactctctacggcaacgtcttcgctatttcggttcttaaaattatgattatatggctgataaataaatgtaagagttggaatttatttgattaagaaacttccttacaacatcaaggaatataaactgcatagaaaaagaaatagtaaaaaaaaaagaaataacaaaaacagctttgctttgacactgtgataacccacaactctataagcattaaattaagggtaaattatatacagtagccgttgacccacttttattttctgattttgacattgtgggctgggcctttcaattcttaacctttcagccaaaaactaaccaaaatgcccttgacgcttcctgaccgggtttggacgtacggactgcgtcgttggaatccaattgaagcgtacactgttcaccgacgggaagtgcattaaatgttttctgggtttcggcgaatttgacactgtaacttggaattaaaatttttaaaaaaattgttgggctcagatgttttaaatgctaaaaagttttgacaaaactaaaactcatgattacctattataatagagattatattataagatatttacataattgagattagaattttggacaaaaaaaacgaatccaaattgtgttacggtgaagaatctgaagttttcagttgctgtttaacaaagtttgaacgtttgaacgggagacaatctgtgatctaggtaagaaattcgtgttattcttatgaattacacctgagaacgtgatatgaaagtaatgatccgtttttaaaaatttctaagttcataaattgttttgttggagattctttttgtctttgtagatataaatgaaagccctttgatctgttttgttaaatttctaagttcataaattgttttgttagagattctttttgtcttcgttgatataagtgaaagccttcaaaaagatctgattttttgtatttaatgttgttctgacctgaggaatttatgttgcaggtatggagttacatgtattaattatggttggtgagtggatatacaaagaagaaggttggaaatttgaagctgagaaaggaagtttcggacgctgtgtacgtattagagacacaacgacgtacacggatttggcaagtacaatatgtgatgtttttagtttcaagtttagtgaatggaaccctataataagttactggatgcctgaaaagatgtctgatatgatagcaagtaatcgccctcgagtatatattgagaatcaaatcagccttgatacatttatgttgattcgtagtggcgatccttctgttaacttgtatgtgtctttttactctatcagcaagggaggccatacagagacagaggttacaaatgttgatgcagctcataagttttacgaagatataaatgtagatgaggatgacataaatgaaggtgatagggatgaatatgaggacgaggaaaatgaagaggacgaagatatggatgtacatgacgatgacactgatagtgaatgtcgtggaagtaccctcgaccctacaatagacggtagtgaaggtagtagcgaagattacgattacaataaatggggtgatctgattgtggaagaatatggaattggtcatgttgaggaggacgtcgtgaatgccactcaacaaatcgtggaacccccaaaggaattcactcgtctattggcatcatgtacgtcgacaggtaaacatgtacatcatgtagaacccactgctgttttggttgacagtacaccaacctctgctccatccccgacgtgtcaacatggtttgtaccaatgtacgtacactagagtctgtgcagaagagacaagatgcgaaggtgaattagttaagtacactgctgcaaatgtggatgatatagctgagaacgtaactggagatgatggtatagtcgtcctagaaggggtttctgcaagtgggttaaatattgaatatgacgaccgtctagtgacaacatgtgaagcctacgaagtgtataaagggttttctacattgcataatggtgagaatgagtttctcgatactaatgctgctcatgtatttgatgatttagccaatgttagagtcgatgagatagaagttgaattgagtacgtcaggtcatccgttgtatgtgggaagtgttttcaaaaacaagcaagtcatacagcagactatgcgacttgttgcaatcaaaaggtgcttccgctacaaacaaactcggtcatgccctaaaagattagaaatggtttgcgtagatcgcaattgttcatggcatttgactgcacatatcataaccaattccaaatgtttcaaaatcacagagtatgattctatccatgtttgcaagatcgagagtcgaaaggattatcgtaaacatgctacttacaagcttttaggcgaggttatgaagaatagatatagttctacgcaagggggtccgagagctgtagatttgcttcaattggtcttaaatgatcttaatgttcgtatctcatattctacagcatggagagctagagaggttgcagtaaactctataaggggtgatgatatggctagttactggtttttacctacatatctgtatcttctacaattagcaaatcccggtacaatctgtcatctccactccactcctgaatctaatggtcggcagcgcttcaaatatgtatttgtttctctctcggcttctataaaaggttggaaatatatgaggaaagtcgttgttgtagacagaacgcatctagtcggtcgttacaaaggatgcctccttatagcatgtgcacaagacaggaacttacaaatctttccattagcttttggggttgttgacggcgagaccgatgcttcatggatttggttcgttgagaaattatcagagattgttccagatactgacgatttgatgattgtctcggacaggcattcttccatatataaaggcgttagtgtggtgtacccgaaagcccccatggagcatgtatagtacacctggagcgaaacatatcagtgtcttactctaggtacggtgtgtctgatttattctttagcgccgctaaagcatatcgggttagagattttgaaaaatactttgaagagataagaggtcggagtcccggatgcgcaaagtatttagaggatgttggatttgagcataggacaagggcatactacataggggagcggtacaatatcatgactagcaacaactccgaggcaatgaacaatgtcttaaggaaggcaaaagcgtatccaattgtctatatgctagagttcatccgataggtcattatgcgatggtttgcagcaaggcggaaaaaagtgtcgaagtgtaactctttggtgaccccggatgtagatgaacgtttcctccaagacttgcctgcgtcaggaaagttcgcagtcatgatgtctgggccatggagttatcaagttactttaaagagtggtgagcattttcacgttgtactagatgagtgtacgtgtacttgtcttaggtacacgatgttaagagtcccatgcgagcatgctctagctgctgcaatacattttggcatcaacccgaaggctgtgattggattgtggtatagccttcaagtgttttctgattctttccaagaacccgttttacctatagtggacccaaatgacgttgtaattcctcaagatttatcggacctgattctcatacctccacgcagtagacaaccacctgggagaccacctaccaaaaggataccatctactagggaaaaccgggtaagtttttcacccatcctaactgctatgaaatttttacttcgttttaaacgacatactattttataactttcagaaaaagaggcagaaaagactcattcctaatcagtgtacaagatgtcggaaaaccggtcataacaagaagacatgcaaaaaccctatttagtcgatgactgttttactcgcgatggttagagtctctatgcttttggacgatgttctacgtacgttttggaaatctttttaaatttttaactaaaccgttacatcaatttgggaccagtcatcgcgtctattcaaaatctatttaagaacctggtaataacacccttcatccattcaaacaaaagtccaaacccatctcacaaataagacagaaagtcggttattctgggttttttttggcatcatggatgctggatatcattccatttttgaaccttttccaatgatcaccggatggagtatacgcgcttttgtggtcagggtgtttaagaaatgcgtgggaataaatgagtttgacctgggtctcatctttgccgataattgagtactatttcgccaatgtgtttataacgtttttacttccacataccttaattgtcactaatcatcataatttcgtgcagggaatgcgttcccgcatagaggctaccattaatcgtcgcattgcttcgttttactctgactgtatccgagaaaatgagtggataattatcaatactttctcggttcgtctccacgacgaggggatacacacaacgtcccatgactaccggatctgttttatggatcagaccattgttaccaaagttttgggattggctgcaataccgtattacgattttattccttttgactacatcgtcgagaagacagtttctactggagtgttagttggttagtatatttgactcgctattgattcttgtaaatctgtacgtacacgtaatacttttatcttttattacgtacaccagatgtgattggtgcgctccttgaagttggcaacttgaccgaagactaccgtgggctgaagcttccttttaagataatggatcaatagtaagtgcctctgtgttattttttaaaaaagttttcacctatatgtttgttatatcctccgtataatatatattctctgtagcaaagaagttcttcaatgtgaagcacacaatgatcaagctttggaatttcaaagattcttccagcggctaactggtcctcaaaatgttattgctctcgtatcctggcgtctgagcgggatttataaactgaagactctgagcaatgaccccatctccaaagtcattgctaatccggatataccggaagtggaagaaatcagagtcgttgtctattagtttatctcttgtctctgttattcttaataactacagatttgtaaccgaatttaaacatatcctatatttatgctaaagttttactttatttccgacattatatttcatggacgtatattatatcagtgtacgttcaaactgctacagtttacttattacaaaatacatcataattgtaatgactttccatggacgtacatttatatcggtgtacgttcaaactgctacagtttacttattacaaaatacatcataattgtaatgactttccatggacgtacatttatatcggtgtacgtttaaatagttgtactctatgtagaatgtaaacaaacttagttccattcataacataaacaataaaacatggaactacaaaacataacaaaagagcaggaactacaaagcataacaataaaccgattagagcatacaaccaaaggatagtaaagccgaagcatataacaggaaaacatatgctttacaaaaagtcgaaattatagccgatgcatagaatgggaaatcagatgctgaaccaacgcctttccttaataaaatatgcacaactccctagcataccagtagaagaaacaattccggcagcaggctccgtagttgcaacgacccaaacatctggtgaaaccacgaacctccatgatcgatcccacatccgaggtccttcagcatgcagtcaacttatgtgatacataaccaactcccccattgtgtttgcagcttcgaatgatggcactaaatcccagaaagtcgcattcacggcttcaacctctcgtctgttgctagttgcggttaggaacagtccatgatagaaacatgcgtaggcgtcggtgggagagatagaacccaacatggttaaaccatgagcaaccgtaacgaaattgcaagctaaacgaaccccttcaaggtaaagcgccgacattgctccccgttcaagcaggagggtaaaatatggtcggaaaggtgttttcggcaacacgaaatcaggccacgtcataaactcatccatgttgatagcggtcggcttcagcgtgcttacgggacctctgagcgtttcaatgggagttacagaaacgggtaagtagttgacgaggatgctgagtgggttaggtagctgaatggccatgtaaatttccgccggtgggggtgtggggacgtccattgccgagtctgagggatttttttggtgagtttaggttatatttgtcatagtaagagtaatgaaaagtgtggagatgacttgtcccagtgtacatgttatatagacctaatggcgaggagacaactaagtaaatatttgacgtcccacttacctattgtaggtggtattaatattggacattaactcgtgtttatatgaaaagaataaactattaactatttccgattaaaactgaaacttcaaattacaattttcgagtatattggtttatgtacgtgtagatttacacgtgtacttctatattgaaatttgtagtttttgatgtaaacccaagctatctcgtcgacttattagttacatgtacgtcattagtaacacgtgtacgtctatataaacctatacgctgaattggagtgtatttattatgccatgtcacgtctatcacaatactgtcttttgcgtcaatccagtcatatttattcctacatttatagtgactttaaagttataatgtaagtacagaaataagtatggattacgaaacttcaaatttattactcatatccgaataaaccattaaacggagaaactttgtaaaccagaggataagcacaaattcaaacataacttcataaaagcattacaagaacttgaacaacttcatgcatagaggataaaacgaattagaaacataacttcataacggcattagaagaacttgaaacataacttagacgataacattaaataacaacttcaaataactagtagatttatattactagagcatttggctaactcgcctagcacaccaccagaggtaacaactgttacacacgttcttgaacggtccagagacaatgtaacaaagcagggcgcaatctggagtttgaataccatggctgttatgataagagaacgtcgatccataagtattattatatggagggcgaaacttctttaaatcctccaggaactcctcacacaaatcccgtatctcttttgtcctgaacggataatgattgcgttcgaataggtttagaaacatggcgcccatgtaatcattaccgtcaattatgaaaagtatcgcacaagcaagtgttgcatgggcttgtgatggaacatgaggtcgtaagaggttgatggctcccttaatgtcacgttcatgcgttagaacacgcagagcttcaaaatacgtggcagtcggattgccagcatccacacaccttttgaaaaaggctcgatgtcggccttctccctgggggccggatggatgatggctgccatcaacttggtagtcgtcgggatcgtcgcacatgctaaaaatattagcacctttcaggacatccagacggtatacaatatctccgccacgtgtgtctgaccgtagtagtggctgaaggtcccaccagcatttgtcagtcattttcttagctatctttgcgagtaaatcgtcgggaatagtcggattcaccatgttaggaatgagataggccaatatggtcaaatcattgtccttttaataaccaaggaaagagagtcggttggggagattacagttgcattgaatgttatttaagttggatgtcaaatcagaggataagtgattatttgagaagactaacatttatctactatatcaataaatgtacgtataaagtaacagtctacgtacatatttaattctcatatttttggtgcaaaccgatgctactttatcttaaataattgataaatgtacgtctaataaggcgttacacgtgtacgtatatttacaataagcatagaggttctagaaattatgacaagtggaagtgtatttattaattaacgcttggcacgtctttaataagactgacattatgcgtctattgactgacatatatgcttacatttattattacatttatagttagaatgtaagtacttgttagaatgtaagtacaaccgtaagtttagtttgacaacacaaatatattattcatgaccgatagaaccaaaccgcatgaaacaaaaacacaagttgtaaataggaaatttcaaagaaacggaagaaacaacataataggaaataacaatgaaacataaacaaaatacataggtccaaacacctaacaaacttgaaacaagtgaccgtgtacacctagcacacgtacaaatgcgatacctacagcatttagctaactcgcctagcacacgaccataggtgacacttgttgcaaacgttcttgaatgcaccagaaaccatgtaacaatggtaggcgcatggtggcatcttaattccatggctgttcggataacagaaagaataaccgtaagtattattgtacggagggctaaacttctttatctcctcgaggaactcctcacacaaatctcaagtgatatccgactccaatggatgatggttgcgtgtgtagagctgaagaaacaatccacccatataatcatatcccgcacatatgaatatgatggcgcaggcgatggttgcatctgctcgcacgggtgcatgacgctgcatgagcttaaatgctccattgatgtcactttcatggattagaacacgtattgcttcgttatacacagccatcggattgttagcgagaaggcaccttttgaaaaatggtcgattgcggctttctccttggggtccggttggattatggccacctcctacttggaagtgatcgggaacaccgcacaagctgaagatgttagcgtctttaaggatatccggacggtagacaatgtctcttccgcgagtgcctgatcgtagcagtggcttaaggtccaaccagcatttgtctgccacttttttagctatcttaacgagtaagtcgtcggaaatagtcgggttgaccatgttagaaatgagatactccgaagaggtcaaattgttcctcccattaataaccacggatgtagatattgttggagaaattacagttacattcaatgagcaatttaattttacattgatggttgtcaaatcaatgttaccgttactgcagtcgtgcactgtgtacaggtggactcatagtctgtacgtacattgctaagatattacgttgtgtacgttgttaattcctaataaaaatgttgcttatcatccaaaagtaataaattgttttgaaaacaaacaagtcaatctaaacactaccaaattcaagttccaaaaggcatacaaaataagtttgttttcccagcatttaaaaataaggttaaggaaccaattccatgctcagtttgcttttgcaatcttcctcctatgttgcggttctatggatcaaggctttttggtactagataactttctcaataaggtatcaagtttcactgaagcacttgagattgcaaacctcattgaagatcagattcgttggataagaagccgtgggactaggcagtaccggagactaatgcctttaacacgagccttttccgcttcagctctttctaaagcctctagctccctctgatcaacctcatcctcagagtagttggcaaagaaatcttcctcgcatcttccatcaatgtgagtactcaaagatggcgtgcctgcatcagctagacttataatcccgccatatctaaatcattgcaaacatcagacgcatgttcagtccacagagctttgtcgtcacgcctaattcctcgaacaagccactcctctgcaccatcaactgcttcaccatttgtctctgttgttggggcactaacagacttaaccactgccaactcaacatgaacgccctccacctcacttgaaaagtattttcctgcgccatcatctacgtcaccattggtctctgttgttggagcagtaacaaactgaactacttgagactcaacacgaacgctctccagctcccttggaatgtatttggcagttccaaaactttccccaagctcacgccaatcaaatttttggatgtccccaccaacactgggctcaatagagtggcaaaaatttaaatgtgcctttgtctcctttacaagcaagaaacttttcggcgcgacagtgctacttaaagctactggaggctttttagacgttgtgaacattcccactttccagctatggcaaacactggaacatcaacaccctgcaacaagcgataaaaaaaacccagcaataaacatttgaacttcatttaaaacgactagcaataaaagtacaaaagggtagaaaggtcaattttcagcaacaaaagtactctttttcgaagtacactggcaaagtacctaattcaaagttttccagtttatgaggaggatgaaataataaatgttatttctgaatattaccaacaaatctttacctcaattcctggagaaaaaaatcaattgtcaatacaaccctaaaaccaagtatctcccaagatatgaatgacaaactcatactaatgccaactccttgtttctctattcatcctgacaaggccccgggtcctgatggcttctcagcgagtttttttcaatctaactaggacaatatcagcgaccaaatcatctctgaagtccaagctatctttattacatgtcctgccaagaagaatcaatcacacccatgtcaggttaataccaaaggtgccttgcccccaaaaggtttcagactacagacccatcactctttgctctgttattacaagatcatatcaaagattctagccaagagacttcaaccagttttacatttgtgtatctcttaaaatcaatcaccttttgttccccagcttgctatatctgataacgttttaatcacccatgaagctctccattactttaaaacctcaggagcaataaaacgttgcttcatggtagtgaaaactgacatgagcaaagcctatgacaggctagaatgggactttatccaggcagctcttgaaagaatgggattccaccctcgtctgattcaatggctaatgcagtgtattaactttgttacctattctttcctcctcaatggtcaggctagacgactagtcacacctgaaaggggaatcaggcagggagacccttatcaccatacatcttcattatctgcagtgaagtgctgtctggactgtgtaacaatgccctcagccaaggtaacttaattggcctaagagtttccaaacgcagcccacatattaatcatctgttgtttgtggatgatacgatgtttttctcccgctctgatcccaaaaactgcgccaagctgaaacaaatcctccacaagtatgaccaagcttcaggataacaagtcaatagagagaaatcctctattactttctcctctaaaacagctcctgaaacaaagactcgggttcaggcagtacttaatattcaaaaagaaggtgggaaagggaagtatcttggattacctgaattgttttgtaaaaagaaaaaggatcttttcaaaatgatagtggttcggattaagcaacgagctctgagctggtcctcacgcttcctttccactgcgggtaagcttactatgcttaaatcagttctttccgctatgccatcctacaccatgtcctgtttcaagatccaaacaatctatgtaagagaatttagtcagcacttactagattttggtgggacacaaaaactgaaaagaagattgggtatcttggaaaacaatgacaaagtcctttagagaaggagggttagggttcagagatattcaaaccttcaactctgctctcttagccaaaattagctggagactgctcaataacccttccttcttgttggctaaggtccttctaggcaaatattgcacttcatccaactttctcgattgcatagttcccaactctgcttctcatggttggtgcagcatctgcttcggcagagacctcttaaaacccaagttggggtacctcattgactctggtacgtctattcccgtctggagaagtccttggctctccctgacctctcctcaagcccctatgggacccccacctttgaatcacatagttggactgtttccaatctgttattgtcggatgcttatgtttggaataaagccctgatccaacgcttactgccagcctatgagaaggatattctaagtctgaaacccagtaaaagatgtgcggctaataaatgggcttggcttcccacaaaagatggatcttatagcaccaaattggggtaccatgaatccttctctgaggaggagacctcacctacaaccccagtggctttgccgcaagaccattgcagttggaaatctaatattttgtccttagctacctccccaaaaacaaaacttctgctatggaaaatggctcaaagagcacttccgttggcgaaaatctatcccaccgtctagtcacagactctatcaaattcccacattccggaattgctgaaacggagcttcacctgtccatttgtgacacagatctggaatcaagctccattcaaagaaagtctgaaccgaaacaatctagtgtccatcaaagaaggtatcatgtgtgctaagaaccttacttgtcttcctccgtctgagattggtaatggtcctctctttccatagatttgttggatcatatggacttcacgaaatcagtttatttttagtaagaaacaaatctcagcaaaggatgcacttgttctagcaattatccaggcaaaggagtggtagtaggctcaatcttctagtccaatgatcagagctctccccaacccacccctccaagccccctcacccgaaaatatggttacctgctttactgatgcctcctggaaacctgagaataaagcgtgcttaggttggctcttcaaggatcggcaaaattgcatcgtccgacaaggctcgactctgctctcttttgttctttctcccctcatggccgaagcactggcaactcttactgcgattcgagttgcaaatgaattagctttcatccacatatctttcgcttcagactcgctcacacttatcaaagctcttaacttgaagctccaattgaaggaacttcacgggattctccacaatatcctatctatctctgctcttttctcattttgctctttcaattccatttatagagagtgtaatcgacatgctgatgctgtggcgaaagcagctctattctcttgtacggatgcctgattcaataaaagggttttgttgttcaaaaaaaaaaaaaaagataaacatttgtttgtagaaaaaacttttccacatgtgttgtctaaatctatgggatagcacacgtctaggggtttcatgttacgaaatgatatcatatagcatctctttctcgccactctaatcccatgtagtgaggttttgatttttttccaacaagtttcagccatggtggtgtctttagcccattcaagttggctcatataggtttttccctcttcagtccttcctctacataataatagcatgacatatatgtagattgcttctttctagtctatgtagtgtgataataatacgggacggtatactacagatgaaatagtagaaataacaatcaaaatacaattatacaatcttaaacactaaacaaaacaaacaatagtaacaaaaagaattacaacttcaaattcaaaattttagaaacgcatcttaatttgtttataagaagctttaacattataaacatttaaactttatacgactgctcaaatcctagaattgacgatagctgttatattaatataagatgatatactacgggtgaaatcctataattaacaatcaatatacaattatatagtcttaaacacaataaaaatttaacaatattaacaataaaaaacttttttgaagttttaaatattataaatatttaaactttaaaataattaataagaaatttaaaaattataaacattgtaagggtaaaattgatagttaattgagattgtaagggtaaaattggaattttatttttgttgtgagatcgttagtatgaaaataacaacatttattttttttgttattaaattgcacagttttattagtttgtatatttttcttccaaccaaaaacaactaggtattaaacgtccaaataaaaattagttgagatttttttccaaatttttcccgtatattattgagaaaatcctagaattaacaatcaatatacaattatacaatcttaaacactataaaaatttaaaaataataaatttaatacaacttaaaatttcaaatcttataattatcgtctctcagtataccatacactagaattgccccacggtacaccgcgggttgatatttttatgagaaagttaacaattttattctaattaatataatattaaaataaaacatattaagaggtataccacatgtgtatatttttatataaaaaaatgaattctgtctttaagatgatatatagacatatgttatttctttttaatgtataatacaccttgggacaatttttagaactaaagaatttaaaatttgaagttatctatatattttttgaatattgttactctgtttagtttttcaaattgtataattatattttgattgttaattatagaatttcaccgatagtatatatcatcccatattaatatcaactcaaacacgtcccaccatataaccccgtcacgtgaaattaaacatcattttgtcattttttcatattataaatttgaaaaaataataatatcgaattataattgtattttgattttatatataagatttcacacgtagtataattttccgtattaatatatataattttttaaaaaagttttattttttttgatatttaacttttaagaatcaaattaaatattgattcctttgcaaaccactttacatataaaaaaaatatagttgaaaatcaccaaacttgtcaaaagaaacttcgtttgcaaaccactttacataaaaaaaacatacatcaaatatctaaaataaccaaaacatgaagaagataaaccatcgtttaacacctttttatttttgttaattgaatttgattgcataaaattaatatagtgggaagtaggctatagtttttacaaagctcactaaataatataactgaaccttagcaattcttgctgagaatgccctttgcacactaccctttttcaattctaccctttcctatttgtcatttttatttctaccctctttaaatttttaatgactattttacccctatttaaaaaatgttttaggttaagaaaatgaaatattaatattttttgcctaaaatattctaaaataaatttcccgccaaaattttcccgccataaattttcgaaaaaaaaaaattccagccaaaaagtttcgaaaaaaaaattttctgccaaattttttttttcaaaaatattttcccgcaaaaatttttttttggcgggaaatagcttttcaagagattttaaaagggttttaaaagatttacaagagattttaaaagagttttaaaatatttacgaggaattttaaaggcctttaaaatatttacaaaggtttttaaaagattttgaaagggtttaaaagtgttttaaaagatttacaagggattttaaaa

SEQ ID NO: 182 - DNA, 99761 bp, Arabidopsis thaliana
aagcttatccactcgtggcctcatcggtgcaatctctcttccggtccagtcaaccttctctagagcactcaccactaatgaaatctggaaaacacatgccaacatctatgccaagccgagctggggtcacatccaacaactgcgcatccaattaaagcagcagaccaaagatataaacacagtcgatgaatatatgcaaggtctcatcactaagtttgatcaactagcacttctcggcaaacctctacaacatgaaaagcaagttgaacacattctcctaggattgcgtgaagactacaaaagcgtcatagagcagattgaaggacgtgactcccctccctccattccagagattcatgagaagttgctcaacaaggaaaacaagctgctgtccacaactacgtccttctccccggtgattcccgtttctgctgacatcgctaacactcgtcctgcaaacagaataaccggtccgttcaaccatggcaatcacaaaccaacaatcagcagtttcagaggaacaccaataacaacaactctcgattcagcaaaggctatcaaggaaaatgtcaactgtgtggagtacagggacatagtgcaaaacgttgtctacaacttcaacaacatcaacaaaacaattcacggaatgtgtcttatccgccttggcagcccaatgccaacctagcgcttgcatccccgcacccagcaaatgcttggcttcttgatagttgcgcaacccatcacctcaccagtgatctcaacaacctcgctatccatcaaccttaccctggcgatgactcagtcctaattggtgatggctcgggtctacaaataacacatactggtttactttccttaccttcatcctctcgtaaccttaccttacagaatgttttatatgttccccacattgctacaaacctaatctctgtttatcgcaatgtgcaattctttctcacgctgggatgccaaagacgttctggagctatgcatttaccactgcaacatacttgatcaatcgccttccgtctccgacaatagccatggaaactccatatcagaagctctttggcagttcaccaaactacggaaagcttcgcacattcagatgtctttattttccatggttacggccatacaagctagaagagagatccactccgtgtgtcttcatcggttatgcaccaactcaaagcgcatatttgtgtctccaaacatccacaggcaggatttatgtttctcgacatgtgaaatttgatgagcaagtgttccccttcactcactcaactcctccatccgataaatcacttccaacaagctcaaattccccattcattcccgtctcccagattccggtcaccgtgccactcgctccgatgcctctgggacccacgagcttcgatcttcaccaatcaccacgttcgccggcaacttctacagagactgcgttagtagatacatcctcctcagccgaaatccaaccttcatcctcaagcccaaatctggcccatactgaaaacccagaaactcaaaactcaaattcaacccaagcccaattactaccaccacaaataaccaacaatccaaaacccaacccacgacacaaaccaatacttcaacgtcctcctcgcagccaaacgttccacctcgctcagtcgacaacgctcaccctatgaaaactcgtcgcaaaaaccatattaccaaaccaaacactaaatacaacctttctgttgccctctccacccacattaaaccagaaccacgaaatgtgaaccaggcgttaaatgatccgcattggcgtggagctttgtcagatgaaattgatgcttttgctaggaatcaaacctttgatttggtccctcggcaacctcagatgaatgttattggctgtaagtggatttttaaaaacaagtttcactctaatggctctcttaacaggtgcaaagcacgtcttgtagcaaaggggtacaatcaacaatttggtcgggattacacagatactttcagccctgtcatcaaagctacaacactccgcttagtccttgatgttgctgtcactcgctcttggccacttcaacaattggacgtcaataacgctttcttacaagggacattgaatgaagaagtttacatggagcagccaccgggatttgtggatgctgacaatccatcacacgtctgccgtctccgcaaagccatctatggactgaaacaagcccctcgagcttggtacatggagctgaaaaactatctcctcagtcttggatttcggaactcactcgctgatacatccttgtttgttctccaatgtggtacgcaatttgtttatctcctagtctacgttaatgacattattatcaccggtaacagtgacaatggcatcaaacgagtcttacaattgttggcagatagattctctgtcaaagatcccgaagaactacattattttctaggccttgaagaacaccgcacaccacaaggacttcatctatcccaacgaaaatacattttggatcttcttcatcgccacgacatgatcaatgcaaaaccggtttccacacccatggcgtcctcaccaaaactgaccaccaactcaggtacaacactctccgatccgactacatatcgacagcttgttggaagcttacaatacctagcatttacaagactagatatctcctatgcggtgaatcgtttgcctcaatttatgcatagaccaacagaagatcactcccaagcagcaaaaagagtactccggtatctcgcaggaaccacaacacacggtattttctttgctgctaagaatactctcactctccatacattctctgatgcggactgtgccggcgatacagaggactacgtctctgcgaatgcatatatagtatatctcggtagccacccaatctcatggtcggctaagaaacagagaggagtaggtcgatcttctacagaagcggagtatagagctgttgccaatgcatcgtcggaaatcagttggatatgcactcttctaagtgagctaggcattacgctatctgcacctccagtgatatattgcgataatgttggagcaacgtttctttgtgccaaccccgtctttcattctagaatgaaacacattgccattgattatcactttatccgtggacaaattcaaaccggtgctctccgagtccctcacgtcaataaaaaggatcaactggcggatgctttaacaaaaccactacaacgagcaaatttcttgaattacgagacaagattggtgttgctaaagcacctccatcttgagggtgcgtgtcaaggatactaattgatcataaaaatattttgattgacacacttatagaaactgtgtaaatgacgatagtctagaatcttcttctgtaattcctttataaaggactagggcgaaacccacgccaagccgcggttttttttttaaatataattttgttaagttgtatgtaggtattgaatgttatttgtcatgattcatgatagatgtagaacaaaaagatttattaaaaagtgattggaaacacaatgcattttttgattttgatttttttagtaagatttatataatctttataagttttggaagctaattttttgctttacgaacatctatttagaagagtcattaaaaaacaaaaaataaaaggagttaaaaatcaccatgtgctaattttggtgaggttaattttattttagattcttaagtatatgttatatggagttatcatctttgatttttaatgttcgacatgcatacttgattcatatgttgaagaggcataaaaaggtaaaagctatgtttgtttgttttacagaatttgaaaattgattttttttattaggactatagaacgttctcaaatgattattagttattgattaaaatccacaatgacgcttagtaaatctgataagattcttgaatattttgagaaaaaaactcaaaaatctttaatgtcttttctttaagattcttcttccattgacttttttcctcgatgttatcttatactaagatttcattcagttcagaaataagctcttgaaccaaaaaaaatagataatagatgcacttaaaaaataaaaatagggacaagaattgaattgatcattggagatttgagagtaaccatacctcaaagataaatttaattagaccttaaagaacaaaaatgacatcttagttgtaataattttttgcttgtttacacaatgtcatcttttcagtgtaagcttcttccccaaaactttaatatatggtggtgatttttattattaaaatgttagttttttctctatcaaaatcatagcatcaaaccaaactgaagaatgataagatactaactaagtattgtaataatattattaatccggaacacccaaaatttgaaaatatttttttttaatttgtcataatctttttttgtcatttgcatattacttgatgatgtttttttatgaagcaaatgcatatttgagtataaaatttaattagtttgaataattaggaagaattttattttattattagttatatttaaatttcacatttatcataataatataatatttttggtattttctattttgtataatttatttaagaaatttaggcccatgtttttatatagatcttagttttgaaagtagtttggttgggttagacccatatctaattttaattttgttaagttgatgagatgacataaaaaaatagtaagtttttattggttaatgtaaatgaggtgtattaatcgaaatgttttgattggctattgattttaatgaggtgttattctgagaacacttgaaaaagttgatgtatcagcacagaaaagatttttagagtttttatagtgttgattgtacattctctcgtgaataataagaaaacataacttccttacagtctttacccaacactatgctcgagattatttatttaaccctttacgaattctgtttactctttagtgggtgtgtgacaacattctttacgtgcggattgtacatattcttttcgttgatcaagcttaatatttctaaattgacgacaaaaaacagaaaaagaacagttaaatattgtttttatatattttgaaagtgttttttttcttctcccgatgtacttcaaagagattttagattatttaacaagaaaagatttagtacttaataataggaaagagccaaaaagggaagtgactgtgaagaagtcaagtggaggtgttgcaaacaaacatatagattggctccagctggtttttcagttctctaacattaaatttcgttttttttgctaactagatattgtttactttttttcttattttattgatcccattcaattaactttctgtctctcttttgtcttcttgttgatgtccctatactcaattgcagtgcattatatgaactacaggaggactagatatatgtcctaatctcttgcttagtcattttatttttgattttgataattttcgtattggtcgatgttttcttaaatattgattttgattgataactaacttttttagcaatacaattactttcttaatgaattcaaactcctcatgtaattcaacaagcagtcaagcaatgtaatcaatggtaatgatcattaagaactgtttttaaaagtagaagcaatgttcaatgcgatggcttgattgaatagtctaattcacgataaatacttcgaaattttgaatagtaaaaaacaatatacaaaagttaaatgtaataaaaaaacatttaacaatacttcgtgtaaattaaataataattgtttagcaaaattagacaaacaagttttgacgatactaccaaacattgaacatctaacgcacttcgttgcaaatgacaaaaataatttgctcagtcctgtgattaaggaccacacaaaaaccgctccatacacatatataatttgtttatttacagctcatataaccatattaccgattaacactggatcatactcataattttgtcgttaacttgagcgtaaaatattatcacgtaaacaacttattgtcatctcaaattttcttctaatggttgaaccatatatatatattcatgtatatttcaaacggacgaaaatagtttcactccaaaccagaatttgggaaggtttgaaatcatctcttaactttaaccctttcacaaatatctttttaatattatattttatgtacaaactgtttaaattccaacttcagttatatcgggcataatgtgtaatgaatatctactataatacataattcctacaagaaacataaaatcataatttatgtgcaatatggaactgtcttcaaactcaatattcagcagttatcatgtacatattaaaaaaaaaatattatgtaaaattctatgaaatcatgagatataatatagtggtgcgcgatctcggagcacagtgaatgtatcttacatattacatatttttagaagaaaataagaatactattcaacaaaaaatcagttactcaatgggatgttgaactttagagagacataaagaaaaggcaaaaaaaaaaacgaatttacaattattttcctctgcaatttttaaaatattacgtggcttagaattctttttttttttgctgagagccgttaagatcgttgctttactaccactgatcctcagtaccggctcagataggggcggaaggtgcgacggctagggatctaatcttatgttctaataattaagggtatatttttttgtaaatattaaaaaagattagatataacacaaaaataaaatttagaatgaaccaataaatttttagtacattgttttttgttttagttaactaaatttttaatagaattatcatacaagatttttttataaccaaacaatactatgaaaatgttgagcgggcactggatcctctctgctgtcttcatgaggaatgtactcatcatttgcagaaacaggcattcatgtttattagtaatcatatatagtttatttttttttatagattcttatacacatgaatgtgtatcgagattccaaagtggtgatgcgtgttagtaactgaatcacaaataaatatgaaaccactaaataaaaaaaactaggttttagaaaaagtcaaccatttttggtttgattaaaggttattttaaaaaagtcaaacactttgctcactgctaagtgccaatcctaccatttcaagactgtcttgacttcacacgactacttgatctacttttaagtaagtagataaaatacttaaacttcagctttaatgtcaggaagcttagaatataaactaaatgaaataatggaccgaccattaaaaaccgacacatgggtgccactcaataaaatcatgttaatttggctgttcctgcttataacatgtacatggagacaatacgttggttcgttatttaatttatcaaagaggggttttaagttaggataaaagaataggaactttgaaggtttttgtttcaagtaattagctgtcttggatacataaatagcaatgtatcgaagagttggttacttcgaagccagacccttcatagctgtctttaagtctctatcgtttctggctactattttgatgttactaacacctgatatttgatctgcgcagataataaattttctaattatttataacatgcactttctgtgtatttaaactattttagtaacattaaattaaactactaaattatatattttgatcaacattgaaatgattttagaaaaatatacagataaaattttaataaacatgtaatgtcgaatcatctaaatgttcatatttatatataagaaaaatgagcactttttccatatggagtcaagttcattactacttacaaaaattaaaaagaggttgagaattagatgatatcaatagaaaacaattaaccaagtatatctctttattattaaaagggaagtacgaatcgaagttttgtctaatttggcttcaattttgatttcaattttagattttattctttgctattcaaaatcattaagggtaaattggtcttaacaatcttctaaactttatatgatccgattcaatctaaactgttcaataaaattaattccgttcaatctaaaccgttaaacaaaaataaggaatctatgtcgtttttgaaatcaaaatatgatcacattccatccttaaaaacactatattcaatcacgaaatcaataatcaataatatccaaatcatatattacgattcttcactaatcactaaaaatttatatttataaatttaggatatcaaatttattcaaatatttagtataaaaaccaaataaaccgattgcccgcagtaaatcgcgggttaaaacctagttatcataatttgcattgacttgtttttcaacaatttagattgaatcatatgaaataataatgaacaaactaattcaatggcttgtttaaaaacaaggaaccgaatatcttactataaaaaaataatcttacgggagtattctagacagcctatgcatagataagactaactaattcatcatacttatcaattaaaaaaaaaatatgataagtaaaatcatttttaaaaattacatataattaattaaagaagaatgtaaatacttaacttttatagaaccaattatttttgggaactttacttggatagttagaattaggtgtattcaccaaaatcatacataacatttttaggcctttttcgatatacccatcgtgcccctactaaacgttataggataaaacgtaattacaaggaatacaactgtcacgtcagaaatcgctgacgtggattaatgaactcagccgtaagacgatacaacggcagttacggctgagttacgatatgttgcggctgacttacgacaaaaatatatgagttatgaaaaaataacggaattatgagtaaaccgagcctacgttacgactgatttataaaatttgtctgagttatgagataaccagcatacgttacgactaagttaatgaaatttgtctgatttataagaatatcgagcataacccagacaacgttattgctgagttattagaaaacggctgaattatttcctcaacacgactgagttatctttttccggctggatggattatcaaagacggcttagttatgggatgtcattacggctgagtaatttttgagtgtcataaatcagccgcaaagagctggattaaccgataactcagccttgttacagctgacttagttgcaaaaggaaattattataatagcatgcaattaaagccgagttaataaacgatacggctgagttattgattgttagttgagttacgactctaaacggctgagttaacttggcgtttttttttattactgtaatagtattcatgttgcgacaaacttatagtttctgtttgatggctgatttatttaggcaaatttacatgttcgtatggtggcttacttgccacttcatcaattaaaaaataacttcggatgcaacattccatgtcatcatcatcaaaggacaaaaaaagggccaaatttttaccaactcgtcttcttcacctgagtttttcatatcaccggaacttttaattcctcatcgtctttctcattcttcttcaatttctttcatcattcttccgatatggttgatccggttccggttattgggtataaaagcacaaatacatatttaacaccgatgaaagagggtgtagagttgtggagatagatacggaaacaacgcatgacaaacttttgatttgtgcttgatgataaaggtagacggaatgttgtgtctcttattgtttcacggcagatttacatatcacggctgagttatatgcttaaggaaagacgaaatgttcggtcaatttacatgtcacggctgagttatatgttccaaggaagacaaaagattcggtaaaattacattacggctgagttatatgcttaagggaagtttcggtcaatttacatgtcatggctgagttatatgttccagggaagacgaaaggtttggtaaaattacattacggctgaattatatgcttaaggcaagacgaaagataggtgtaaattatatgttacgactgaattatatgcttcaggaaagacgaaaggtttggtaaattacatgtcacggctgagttatcattcagggaagacgaaaggttgtctaaagtatatgttacagcttagttacatcacgttacgactgagttacatcactttacgactgatttataatatagatcggaaagcaacatttttttagggaagacaatataaaatttgttggtcaaataaaaacaatcaaattaagaaacttaagaatatgttagagggatacataggaggaagactaaaccgtatgaatcaaaacatagatagaagtagaaatatcgccaaatagatcgattgagaggaaaactaaacgagacatgtaaaatcaaagtaaaagagtagctatccttgatttcaactcaaacctgtaacgaatcatgttaaattacatagatctctttgatttgagttttgatttttgatgacttttgatttgacgaagcttttgatttgggaccctatgacaaacgttgtgggtgtaaggtctaggaagatctagctcaatacccaagttagttggagattattagatctaaaagcattttttggatttggagacaaaaaaaaaagagaaaaggggaaataaagtgagtttgaagattgtgatattggtgatatgtgttaatgacatggataatcaatttttttatttattatttttacttaaaaataaattaaaaatttattaattaaaaaaactaattaagggtgttaattgtaattatacaaatgctcaaaacatatgagtaattgaaaaaatgtattatattttagaaataaaaatacttttttatgctatcgaagtaattaattcattattttcggttataacataagtaattatttcagtaaaaagaactgtgcaaatttttgcttcatttttgaaaacgaaaaatatttgacagttagaaagaggcatagaaagctgataaatcttcaactttgagtactaaactagaaaataagaaggttttcatagaggatgtttcccaaaacctggaagccgataaatttatcacgaacaaacacttaaatagaagtggtaagttgtagagctgaacttagaagagtgtggagtcatgtgaattcataccgttggaaataacggttttgctcaatcagagtgtttgagccattcgtgacaagttttggtgggtaggcctttatggttgttgtgttgtttggctccataatcatcaacatttttcgatagttctcttaaatggttaaattttctatgcatcttcaagatgatgtcttcttgttgagtgaattcttcgatagataactacgcttgattttggtacaatccaggtcggtctttacgttgatccgactgattggctggatcaatttggattccacctgattagttaagtcctggttcgcttggtttcttactcgtcaacttatttatgtgttttgcttgatgtcaatatcaagggaaaaaaaagtgaattagtttcctaattacactaactttttattctaatgtataattttagtttctatttaacagtaattttagatctcataacttaaaaaaaaaaaaaaaaatctaaaagacctcaaaactcctcttatccttaattttacaatatataaaatttaagtgttcttcagctttttttcttagaaaaaggtcataagccaaagttttcatttcttcaaatgggtctgcctttatatacaaaagttagcagcccttaaattcattacaagttacattacacataatctaatagaaagtgtcatagaggaaaaaccaaaaaagacattcagtgacactacgtaccaataaaagaaaatacaaggcccaaccttaagccttaatacgtgggctcaatataaaggcagatgcgcttgaaaataattctacaataattattttttttataaataactctttctttccaagcattttgttttgggttttgtgcaaaataatctaagagtcgtccatttttgcaactttacctttcatgtacaaacaatagaaaataatcctatgaaatccaaaataatacacaatgtagtcttttattgttattgtcaaatatctaaattctgataaattatatatatccaatcaaatccctcaagatgaagagttcaactatatctttaaaattttcaaaaataaatgtatatgatcatgaaaacgtttacaatatatgtaaaattgcaaaaatgagctatattgcgtattattttagatttcataggattagtttgcattttttggacgtggagggtaaagttgaaaaatgggcgtctttaagggttctttgcacaaaacccattttttcttccaaataattttaaatatgataacgaaagttttgcgaaattaaaatatcttttcttatctaataaagtaatgttacctctaaacacaagctactacaagctgataagtggcttatgatatgtgtctattgtcatatggatccaaattcaatgtgtttattagtaaataaaacaaatttgtgattaaatttaaaatgattagaaatagataaaatataggaaataaaacaaatttggattaaaattcaaaatgattagaaaactaaaaaatataggaaacaacaacattataattagcacatttgttttccgaataattctgatagacaataaaattccttttgttttttcctgattttctgataaaataattaaaattataaaagtttttttttaatgacatgtgacatattttcctatgattagtttctcctttttctattactaacattattattaacttattgtagtatcattttaataaataaattttaattgttgtagtttctctaaaaacaagcattgagaagttgagatgtgacatctctgctttccatatgtatcttttctcttaaacttcaattaaatttcattttattaaataaatatctaaacatagcaaaaagagaaaaatatattagagatttactttgtatttttatttaagttcttttttataatttcaagtatatgattaacatcaaattattttacggtaacctcatttttttaaacatcatgtttattgttttgaaaaaacgtaattgaccgtatcttaactctttaaatacaactagggaggagaccctcgcgttgcaaagggtggtttgctttgggtttggttagtctgtaattgtaacttctaatcttttactaatctttgattaaaggggggataccttagtcatttgctaatcttgtagagctggagaagtgtaagattttatttttattaaattcgcatattatttagttttctcttttgatttctacattattgtaatctgtgtatagttttacattattttttcatgtcgctaccagttatataaacgatttggacgttaccggtcggatgccaaaaattataggacaatggaccaaactaactatcactaagcaatgcatttgttacattagtcttgtttaatttatagagttatatatatctaagcaatgcatttgttacattagtcttgtttttatagagttatatatatctaagcaatgcatttgttacattagtcttgtttttatagagttatatatatctaagcaatgcatttgttatattagtcttgtttttatatgtgtagattttaaattaaaaatacaatggaaatttttctctttctcactaagcggttgctgcaaaggatcgcgaagaacaaagactaacaacgaagtggttacacatcgttaccgttgttaatttaggcccaatatgaaccggtccattcgtttttttctctgttttgtctctgctaaaaccttagagactactcttttgttttgcgttgatttcacttttcaacgcctcttcgcgaaaaagccaaaacttatggaagaagcgaaagcacagcgagatggtagctccaccacaggtgaaaaaagcgatgtgtccggaaagacccaaaatgaccattttgggatgggaagataagagtgaagaaagctaaagctttgacttcatctggattcaagagtaaagaggaggtttggttacttgttctcgtcgaatcaatttgaggttgattttttttttaaaattgttttttttttttgttttgatttcattttagggtttgaaattgattttgtttttgggtgttttgtgtgaagatatcggagtttgatgttgaaaatggtttcacttctaccacactgtaagaaggacaataaagttgaatgtaagagtagcaaaggcgcgactttgaatgacgtcattgaacttaaaggatataattcatgtttgttctttgaggtaaagtttccatctttatttacttacttatctctaggcttagcttttcttccatgtaataaaagataatcaaatttgttcatttagtttggagtgtatcaatggaagctgtttacgactgaaacctcagaaatatgtgattataatactcaatggaagcttatttatatgcatattgatagaaatggataatctttcactctattggttgatttgtgttaatttagtatttgttccgtgttatcaaaatttgatagttatccaaagtgttaggattttgtttgttattacaatactcataggaagcttaagtatatgtatattgatgtaaatgtacaatctttgaatgtattggtttattgtatttctttccgtttccatcttcattgtatgaaacataaagatctttaaatgtggatggtcaagtcccctaatggatcatcaatgaagttttgggttaacaaaacactatagaaaagcaccattttagtttactcatacatactttaatcaatttgatttgtccttagcattcattgggttgtcctcctttgttgttttggaaagttgtctttaataaattactattgttttgcaaattattccttacttgttttgttcatattttgatttctttctacataaataatttttggttgattgatggttaacaatattaataatacgttgaaagtactctatgcttagaaaggtaatataagattcttacaacaacaagggaagacaaatattaaagcaaaagaaataagagaaataactttgttttgagtctttgtgatagttctcttgatgttataccataaaaataaacttaaacaagaaataaacacacatgcatatagcaaatcaaaatcctcccaggcactcctccagaggaatttttgaaacatgctattatccggatctccttagctttccctcctttatccgttggtccccttcaaaaatcacggcaaaatctagaggatccttccttctgctgggatgatgttcatcaatgttcttcaacaaactttgatccgccttgctcaacctgcattaaagtcacaagatctcctcactcaatgttggtaaccatccctgtttactaaccaaaacatatttaaatctttcaatccctgtttttaaactctgtttcaaatctgttcctacccgcccctatataacctcaaactgagtttctctacaaaccattattactcgctacaatggagaaccgcataccatatcaccaaaaaggcaaagaattgagagaggttactcaccccttccccgtaaaagaatcgagccccaaatctagatacctcagatcttgttgaggagaatgctctaaccctaatagggcgcttaaccaaccaatctggacaaagactttgggctttattcttgtttctctctaatccttggactcttaaaggtaaagccattggatcagatctaggacaaggagtctttcaactcaagttcgacttccgtgaggatctccaacaggtcgttgataacagaccataccattttgaccaatggatggtgattttgcagaaatgggaaccaattatctcaccctcattcccctctctgatctctttctggattgaactccaaggcctccctaagcatttttggaagccgaaaatgctacaagccataagagaggaacttggtgaagttatgacaaaggaaataacctcttcttctgtcaaaataaaagtcctcctagacggcctgcaacccctaatcaaggagacaattgttgacttccctaatgggggtgaagctgtggtctacttagactacaaaaatctgaagaatcactgtctacattgtcaaagattatcacatgagaagaaaaactgtcctagagtgcagtcggcccctgtaagcaccaaaacatccaaccctttacctgttgcttctctaccagtgtcacagtccaactcaagaaactactacactccagctgacaactttgtagccccaaagtctcccctcacactctggacggagaatccaccctcaccaagtggccaactctaataaaaggaaagcgtctcctcgggatgacaggtctcattcaatctcagaaaccagattccctgggtcagggaggactgaacatagattaaatgcgggaagatacaatgaaggtacaagaagctctcacatcgcttcacctcaactcaccaggagggaaccaagactgtcaactcaccaaaatctccaatggagagaaaaatcaaactcctcaacgggttttcaggcagcaacttctgactcttccagagcgaggagaccacctctagagagaaatttaccaagttctgatccccctactcctcctcctttagaggaaactgagttacaaagcggcctcttctccctgaacccattgacccctctgcacccctccctataagggaccaggtcttgactgagctgcaggacgtcactattcaatatatttattgccctgatccagacgaaagtgcggccagaaaaatcagagttgcctagagtgaatcactaaacatgatggaaaccacagcagacggcattgtcacagctgcatcaaagcttcttgcctctaccagtaacttggcagctatttctcatgatgacctccagtcctcaccctgcattccggctgaggttccatcaacacagcttactgcacccatcaaaagaggacgaggcagacctcctattcaaaaacaagttcaaagatctgctaaaaagcttttggactcaaaatcatagaagagaaacttcgctcaaggttctcctaagaagcaccatgaaccaaaaaccaaccaaaagtcaggccactccaagtcaaagtagagcacctctaccagaacttcttcatctgaccctctatagactactaatggaccttcctcctcctctaacccaaaaatcaaattaatccctgcaagtaggaaaaagaagacggattttctgagtctgccaacctcgcttctttaaaaatggtgagctggaactgttgtgggttggggaaccccatgacagtccacataatattgggaatccgtaaatcggttttccctgacgtgttctttctcatggagatgaaaaacacctctcataatgtactccaactgctccatgaccttgattactctactcaccatcttgaaccacctcattcccaaggagctggtgggttagccctgttctggaaaaatagtgtgaaagttgaaattatctcatcatgtcaacactacatagacacaaagatcaaagctaagggtcaatcatttttctcaacctttctatatgggaaaccagattgaacaaagagagttgcagtctggtttcaattacaagaactggctagttctagggattctccatggatcctcactagtgacttcaatgacatcatccacagctctgagaaagttggaggacccccaagacctgaaggatccttttcagacttgcatgtgatctatatgatttaaaacatactggcaattacctatcttggagagggcaacgacacactcgcctagttaggtgcaggcttgatagggtaatggcaaacaatgactagattttggcatatcctttaggtcgcagcgagtatctccgggttgagggttctgatcaccgtcctcttgtcatctcctttgacccgaaaaagaagagaaaaaaggttatcttcagatatgaccgacgcttaaaggatatcagtgaaatcaaagacattgtgttggagacttggacctcaactcgatctgcgtctgtggaccaaagattactgtcctgcaggctagctaacattacttggagtaaaaaccaacatctcaatagtcaaaaagagatcctcaccttaagggatcagctagaagaggcaatgactagtaatacaactccccaagaagagattgatctgataaataaaaatttgttattggcttaccaaaaagaagaagctttctgaaaacaaagaagccgcaatctctggcttgctcttggtgacaaaaacactggcttcttccatgccgctgcaaaaggaagaagagctctgaataacatttatgttattgaatctagtgccgattgttttaaaaaatgtgcccgttttaacaataattctttctattatattggcttgtcgaaataaaatattggtgtgtcgttcattttttatgcaaataaatgccaataaacatatgaaaacgtttttaagattttggaagtatgtaagccgtcgtatttattaaataaactattaacagaattaaattttaaactcaaaatcctattaaatgtaccattacataacaaataaataaatagtaaattcattcaaaatttaaccaaaaactaatgttgctatttgccatatggtgcaaaaacttttatttaatgtaaatctgtaattatttaatacatacatttgagtgtaatttagataaatatttgtgaaaactttgaccattctcttaaaatttgatcttctataaatttgtcaagaaaccaaaactatatattataatatttgatttggttcatataatcatctttctcaagttcatagagtttaaaattgttttgagttttattaatttaaacagtttttaattgctaagagtgtcaatgcttggatataagtatataactctaaaggcatttcatttgtaacgaacttttttcggttagagaaagcaagtgggaataaaaaggatacgctctttctctcccatgcacggagtcccaaaataactaaagacagctaatggtttaaaaaaaaaatagatccaaaaactctttttagcaattttaggaaagaattacctctccccggtctggaaccatcttctttgcggcactgttccaatgtctttcttcctactgttggacttctattctctctttactccctctcggctctgcttttttctctgtttcggatttctgtctcaggagttcaattcctaaatgagaaccataggctctttgttttcttttgaagataattcctgcataagcagtgcttgcgttctaatcattctagcttcaagctaagtcgattttcttgctttctgtttctttgctttcttctgacaatgttaaagagagaaagaccaagctggttcaatgtcaaatagacaaagaccaatgcacaatactttgaagacgatgaccttttgggggaagaacttcaggattgtctaccggagtgcacgattgagttgtgtaaagggtcgctagatctgacactgtcgtcgatttcggtcgcgattccggtggtgaactattaggctgtgaaagctcagcaggcttctcagattattactactacggttcctccaacaagcgcctctgtctcgactggatcgtcaaaaaaggagcccaaagagccgaagaagaaaagaactgaggctcattcacgcaaggcccaaatcaatttgggccttctaattaatctagttacaacgaagtttcatcacttgaaaggaaggtccccaagtaagaggttggcaaataagtccggctcactaaagcgggggtcttctagacgggctgatttggcttctcgtaatggagctttcttggttacaaagaccaaagtttctggttcgtttgttacgctggggtcacctattcccccccatactaacccatgaggatcttagcatggaattgccaagggatgggtgcaaaaactacaacccgtcgacgggaagacatgtgtcgtatgtactccttgcgcaccttcatgatctacaggtgtcgttagggttttattgtttacaaatgataacaatgtattttaatcattttaggcatgtatttatcatcatttagcttagttatcactcattgtttcatatcattttgcatcacatttagcttattttgcacacttaggtatttaggatcatcttgcatacatattgcatgttttggtgtgttttcaggtgcagaaggagcttaaaaggattctactcgaccctctactttatccaaccagaagggaagcagcagagcattctactcgacccattcactcgatccaggcagccacagaggaggcagcaattcactcgactcacttactcgatcaaggcagcctcagaagaagcagcagatcgatctactcgtccctcctactcgatcctctactcgaaccatttactcgaccaagggtgaccgactctaccagacttgtcgatctatcaaagcgtctttggatcctcctcattccccactcaacaagacatttgaccatacagataagagaggaagaaacatcttccctctttactcgatccccaagatcgagcactcgcccaaaccgcctcaagtctcttgtcttctagtgaatctagggttttcaacattttattataaatagatcactttgggatttgtccaaaggatctagcttttatcctttagtttttctttgtgttcttgaatcttcaaaacttaattactcttaatctattttgtttttgcatttagttcttggagtaaagttgtctagttttttgtttagatctacattttgatatgatgtcagtaatttctgggtttgtgttcttagttatgttgcttgagtagtgattagggttcttgaggatagattatattagggtaatctctaggttagttaggtggttaagattaggttagatatcttctggattcgttggcccctatgcggttttcgctggctaatgtggagattcgaccatagacgtccagcgtccaaaagacgttcaaatggatgtctgatctacgaattccagagatttatagacttgaccaaaggattggctagtctgtttattggctttggtagattgttgcttaaaccatgctatgctatgtttcatcaacgagagttgagattaggaagtggtcgagttatgttggtctctgttacgcgagtggattgacccagtttttgaatctattgtctagggtatctacctttcacctgttagccacctgatgaaccctagagttgcccttatcaataaatccatccttaggacttctattcttcttagatttatttgtattcaccccctgattgcacttttatttacctattatttgtatcccctgttgattgcattttagttcttaatattgtcatctgttggttatacttgacccaatgatcgagtagggcttttaaagttcttatttttgttgttcgaatcctgacctaggattgttactagaaatcaaccatctctataatctggcttcacttagttgcttctgtaaacatcttgattgctagcaataacagtggattggattgacactccctatagctgcatcgacatgttagtgtttaagggaaattgaattgaacctcacttcagcatataagtaggcgtaaaaacctacttatcaacaaactgttgaacctataggtaacagtggtggtcttgctcttttgtattttcgaaactatccggttaagtttatctttgtatgcgatcgtttgattgatattgaaacgattatagatgcaaaccgcgtttttattacctttatttatggggattcggtagttcaataccgataatttgttagggagcgtttaactcgtattggtattgctcggtctgagccatggtttatgattggtgacttcaatgagatcattggatatcatgaaaaaagaggaggaaagcggagatctgaatcctcctttctccccttccgatgtatgatcaaaaattgtgggttgattgatttcccctctatagggagtttattttcttggataggaaaaaagagttgtggatcggctagctgaaaacgacgtgacattattaaatgtcgtttagacagaggtatggaaaatgaagaatggcatagcatcttttcccacaaaatgtggacactacaagaaaacaggcgattaacgacctacaagtcagtcgtttcgtagtcgtaaataatgataatacgactaatccgcgactaataactgtagtcattaatccatagtcgctaagtatagtagtcgttaattagtcgttggtcaacgacaataatacgacaaccgactaaacagtaaatgttcgtcgttacgtagtcgtactaaatcggcgactaattgacgaccatcttacgattagtcgtactgtacagagcgtgtgaggacatggagtcgtttagtagtcgttaatagtgtacgacgactttacgactatgttgcgattaaatattctaaaccctggatatgtttccagttgtcgtaaaatagtcgtaaacttttgtacgacgaatcgacgactgtttgacgattaaatgtactttaccaaggatttgaaacttttagtcataacatagtcgtataagtatatacgactattggacgtctgttttacgataagattatgacttatatttttagtcttataattgtcgtaaagttatgtgactaattgacgactattaatggactaaattgctacttatttactactttttttgcgactaatagtttggtccgaataaggatttggtcatcaattgttgggtttcttgtttgttgtttaaagtcatcgattgttcttgtttgttatttgatatgctataaaatatgaaaagacactactcatatattgaaaatcaagttcaaaacataaaattatcttgtttctacatacaacttattgaaagatacaactagtgtttggaaacctaaaatctatggatcattagatggtggagtaattgggatacgctctgtggatgtggaagagtgtgtggcaatgaagtccaagaactgcggatcggtttggcggagatacttctcgactaaggacaagtgttcgagcttgtccttttgctcagttgtgactcgggctgactccgcttctcgggcagcaatctcagcatctcgcttctcgttatatgcagcctgttcttcaatttgccgctgagcttcctgcagccgttcttctaaagctttaaaggttgagtctccggggagttggcggttggcactgcctagagtttctttaagacagccaagtccataaggattgtatcttgcaaccctttctgtggactacaagaaagagagaggaagataattagtgacagatcctaaatgtctctaagactctgaaaaagacaaagaacatcttacctcgtgaaatatggctgtatactcatctagtgtgagatcccgaggacgtgaagagccatcagacacagcagaagcagccgcctctagttcaaacaacttctctctcacattctgctcatacgccagagcaattttctctgccttctgatcaacataagtcccatccgacttagtgtgtgtctggatgaacacctcaccaagagggacatgtcttcccattttttcttcctgcaaacacagatcacaatcttcattactatcaacagactaaacatcacacacagttaaacgaacatcactaaaacacatgggaagattgcagaaacacttaccaattcatcttggatttcttggaaagactttggcccagagtagtggacgtgaggaccgagaccgttacggtcagagagacgagctttggaataggtcttactccttttgtgtgcttcttctgtgtcccagtaagcacacattgttccccacagagtttctccaatccatggaggctgctctcgagttctccttgtggtgctaaccatgtccttcaatcgcctcttaacgatctcattgaagtagtattggactgtccctgttattaagggatcctagtggtgagttttctacaaaaaaagtgtgaagttagtgaacacttgacagattaaatagtaaagtctaaagaaagttggagaaatacaagaagcttaccgcaaattctaaaaacaatctttctcttttatccaatggcacacaggaccaattatagtagggagcattgaacttttgagtaaaaacccgtgtgatctttctaaccaatttagatcctctgtcgcgagtaaacctccaaacacatgcaacacagacagaagtaaacatgtttaaaatccaaaacactacaactatagtagactatataactgaacaaaggcagattctacaaagattctagacaagtataagccgacaagatcacacacaaaacacaatagtcaacataacaagatcacagacagtaaagaacttaacacgattctagacaagtatagaacaaaggcagatcctcaatgtctaagccgaaaacatgctaagttcaacaatcaaaaaatgttccacaatagttcatgattcacaacagaacacaatagtcaacataacaagatcacacacattaaagaacttaacaagattctagacaagaatagaacaaagacagatcctcaatgtcaaagccgaaaacatgctaagttcaacaatcaacaaatattccacaattatattcatgattcacaacagaacacaataaagaacttaacaagattctagacaagtatagaacaaagacagatcctcaatgtcaaagccgaaaacatgctaagttcaacaatcaacaaatgttccacaattatgttcatgattcacaacagaacacaataaagaacttaacaagagtagacacagtgaagaacttaacaagatcacacacgagtttagaacaaaagcagattctactatgttacacaaaccataacaaacatccaattccaacaaccatcattcacaactatgttccacaacaagccattctacaaaacatacaacagttacacaacacaggctaagaacacgagaataaaatagaggaagagaacataccactcggtttttggtttgggaatcggagacaagacacaacaccattgctccctgtttggcacggagagtgtcgcttgcagagccaccgccgagtcttcttgtagctccggcaacatcccaagaacttcctcttggaagttgttcccttgagacgacgcgtggctgtttgttggagcgtcagaatctggcgactgaggaggatcttgctgagctggcgctgttggcggcggattgtagtggacctcttcagatagaggcggaggagcttgatgttgtggttgagtcgttgagttttggaacagttgcagaggcggaggatagttgcggacgtggggggcagacgttgaagggccatgttgttaagccggctccgtcgcaggaacttgaaccgccggcgccggagtgaagttgtattggggaggcagattagcaggtcttgatccgccggcgccgtctctttgagtgacgttcggcgtcgtcttacgctttcgggagccacctcgaccggcgataggcatgatagtcgactgagaagattgaagagaagaagaagaagacgacgaagcagatcgaagaggttgaaggtgggagatcgaagaagatcgatcgatcttagcagaagaagaagaagatcgatcttagaaggagaaatgatcgagaattggggattagggtttgagagatgaagaagctcgataattgggattagggtttgagagatgaagtagatcgagaattgggattagggtttgagagatgaagaagagcgagaattggggattaggattagggtttgagagatgaagaacttcgagaattggggatgagggttttcgagatgaagaagaagaagaagaggaagttggatcgaagagaaatggcgaaatgtttggcttgaagagaaatgactcgatttagggttttcaacactataatagtcgcataatagtcgcctataataatgggtttgggccgcgtaatttgaaaccccacaaaacaaacttgtgtcggtatttattcgcattatggacgcctataataatgggtttgggcttcgaaatttaaaagccccaacatatcaaacatgtgtcgcataatggtcgtcgctttgtcgccgtttttaatgggtttggacttcaacatttagaagcccaataaatcttattttggtcgcccattagtcgcataatagtcacttgttaaattgatataattataaatgtgaaagaaatatgcatatatcatataaaagttcaatgatattatgaaacaaaattcattctaatatttattcaaataattatacatatattcacacagttatacatcttcatcttctacttcatcttcgtccgaggacgataaattacatcggaattcgtcttctggttcagcatccccgacatcgtaatcaaggattattgggtttaagttggctaccggagtttcaagtacaagatcttcaattgtagtgagcaaaacatcatcatcattttctgtttgcaaaagagttgaatcattgtttttatattctccagaaatgtttcccctcggattgacttttagaacattgagccaaatgttctttggtttcttcgtatatggattcggaatataacaaacttgatctgcttgagatcatgtatacatatatcaaacaagtttattaataattaacaaagaaacgtattttggacttcagaattacgtaccaagaataaatggctcgtatttattgtatttcctcgtagatagaacgtctacaacgccaccatggcttcgtcgagtgcctctcccgatctttgggtcataccacttatacttacaaagtgtgatcctcaaattgacgacaccctcatactcgagttctataatatcagttaaggtactgtagaaatccgcttccttagatgaatcagcgtaattttcacctttaacacagagcccatagttacatgtctttcgtccagcgccgtgattttgcgtatgaaacaaatatcctcttgtgaaatacattggccaagttttaaccttgttcaaaggtccttgcacaatctcttgaacccaagtaggaaatggagaagtagtgttccaatatgttacctacataatagataaacaatatcaattagtatatattaaatgatcactttttgaatgaaccaaaattgagatagacttacatattctttaacccatagatgatattcttccgctcttctcgcgtagagttcttttttgggcaagcatggatatttggcagaaaaataatcttctaaaatactacatttacaaacgaatttttttttatcaaagtgatcttagtgaaaatttacaaacaacgagtgattaaaaatacctctcaaatggtttaaaatagtcacaatttcttaaaacatatgcatgtgcgctttggtagtctttctctgaaaaccaatctacatgcatttcaccacttggacggccgacgtgcataaatatattaggtactccagggacatgatatacaggaacttcaccttcattgaatcttgttaacctgatccatgtaagtgaattaataacgaataatatctaatcgttaaataattaaatatatttaccttgattttgtttgaatatgatcggcaaagtagtgctctgaaaaataagccatgtcgtcattgatatatgactcaacaattgagcctgcaacatatcttttgttctttgtttttcttttcaactttttaaaaaacctctcgaatgggtacatccacctatattggactggtccacccaattcagcttcgtatggaagatggataggtaagtgttccataacatcaaaaaatgatggtggaaagatcttttccaagttacagatgattaaaactatgttctgtttgagaatttgaacgcgacttgtctgtaaaattctcgaacatagatctcaaaaaaatgctccaattcctaaaatatatgtgcaagttaaatgattagattaaaaaaatgttggaataaaaaatagtaagtattgtacctgatagtccaaggtggacattccggtcaaggagttcagcaaagataaatggaagtagtcgcttcataaatacatgacaatcatgactcttcatgcctgaaaactttccattatccagatctacacaactagccaaatctgaagaataaccatctggaaatctaatatcatgtttcacacattgtaataaactctgtttggcttcttttgtcaatgtatatgctggaaatggagctttgccattactatcaatatgtaagcctggccgtgaacaaaatttctaaatatccaatcttgacatgatattgtcttttgatttacccttaacactcatgagagtgttcatgatgttgtcaagaaaattcttctctgtatgcatcacatcaatattatgtcgaagattgaggtctttccagtaagacaactcccacaaaatgctttccttgtgccaattatgttccttcccatagcctcgcatcttcttttcatgaccgttcccaccaacatccttcgtttttggtggatttacactagccaacctctcgtaataaacttgctcccctgtcaaagactcaggtggatactcgctagaagcatctcttcctttcagaaagtcttttctgttccttcgacggtcgtccttaggcttccatcttttcgcgccacaaaatcgacattgatcttctttttcgtattctttccaaaatagcatacaattgttctgacaaacatcaatcgtatgatatggaagtcctaaattacgcattaacttctcggtctggtaatgtgaagtggtagcctggtttccttctggtaaaaaatctgtaaacatttcgcaaacggagtccaccaacttttcactcatattatactccgccttgttgtgcatgagtcgagatgccaaggataactgcgactgcccttcacgacaaccattgtacaaaggattatttgcaccttctaacaagtcgtagaacttatttgaatggttacggaccggttcttccacattctgataactatcatcatgatgatagttatcatcataccccacgttaaaattaaatgcatcgttcaccatatccacatatggatcttctacaacattacccacttcttcatgattctcactaaaatacatcctatccgtgtaactcgttcctatatccatattcatttcttctccatgcttataccaaacataataatcaggcataaatccttgactaaacaaataactactaacttttctacccaagatgatatgttttttattcttgcaaatactacaaggacaatgaaatttacctcgactactctgtactattggctgactattagcgaatgtcattaattgctcaactcctgcgacgtattcggctgacaaattccccgtcacttcatcaaatctcttgtacatccaatctcgatagaaaccgccactaccgccataattgtagtttcccgccattatacaataaactaactaaattttttttttctttgatgttgttgttgttttgatttgttggtgaaagaagagtttcgtgaaagtttattatataggccaatttttgtgactaatttacgactaccactaaataattaggtgtacctacttaccaatgcgaaacacgttttcacctactttatatgactcctatgcgacgtttctacgactacaggatgactaagtaaagtagtcgtccattagtcgtccaattagcgactaaattagatagacggtatgatagtcgtcaaatagcgactacgtaacgacaaccttctcccttaaataatataatcgtcaaatagtcgttacttgtcgactatgttccgactatctatgttagtcgtaagtaaacaactatgtaactacaaatattcgagttgtcgcactgtagtcgtaaatccgtcgccaaaatgtcgtttaaatatacgactacgttggttgtcgctgattgtagtcgtcttttacctgttttcttgtaaacgtacaccagagtacctacaattgaggggttccgattatagaccccttctagcatccatttagaataaatctcagcgtccttataaacactttatctttgataaacattggatagataaaccaggattcaaagattttgttaaagaaggatgggctttctcctctcgtggagagggctttccaatattccaaaagattaggaattgtagacaaactatttctatttggaaaaatccaattgaacaaattccgagaagctcattcttgaactacattctcagcttgatctaccatacgaagatgagaatttttctactgaagacttacttgccctaaaatgaaagctctgccaggcttacatagacgaggaggttttttggaagcttaaaagtagggagatatggctcctacttggggacaaaaacacaaaatattttcatgcttctacgaaacaaagaagggctagaaataaaattctaggcttacttaaccaagatggcctatgggtggataatgagttgcggatcgaacacttagcagaggattacttcaagactcttttttctacgtcaaatcctcgagttttttactcagttctctggtaagttcccgtgttagtgaccaaagacatgaacaaaacactcacaaagcgaactttatagaagaagttaaacgtcctctttttcactaaaccttgataaagctcccggtccagacgagatgacaaccttctattatcagcaatattgggacctgacagggcctggccttatcagacttgttcaaaacttccattccaccggcttttttgataaacggctgaatgagaccaatatttgcttgatcccaaaaatagaaagacctagaaaaatgtcagaattttgacctatcagtctttgtaatctaagttacaaagtaatttcgaaggtcttaagctcccgactaaaacgtcttctttcggaccttatatcagagactcaatccgcctttgtggctgagcgtttgatcactgacaacatccttgtcgctcaagagaattttcatgctttttgcacgaatacagcttgtaggaagaagtacatggccattaaaactgatatgagtaaagcctatgaccgcgtggaatggtcattcctacaagctttaatgttgaagatgggcttcgctcagaaatgggtagattggataatcttctgtatatcgtcggtatcttacaaaattctgttaaatggatccctaaaggttttattaaaccttcgagagggattcaccaaggcgatcctatttccccgttattgtgtatgctgtgtatggaagctcttgtagcaaagttgaaagatgctgagtggcatggcctaatccaaggaattcagatctcacgagctagtccctccacttctcatctcctttttgccgatgatagtcttttattctgtaaagcaggcccagtacaaggaaaagagattatcgatattctccgaacatatggtgaggcttcaggacaacaactgaatactaacaagtctttaattttttattgtccatgaggtgaatagctctattcggaataccattaaactatcttttcgaatatttaagaatgggggtatgggatcctatttaggactcccggaacaaattcatggttcgaaaaaccaagttttttcctttgtgggggatagatttcaaaaaagaataaatgggtggacatcaaaattcttgtctaaaggaggcaaagaggttcttattaattccgtggcacaagcccttccgacatatgttatgtcatgctttcttcttcccaaaggtattcgctcaaaacttagtagtgcaattgcaattttttggtggaagacaagggaagaaagcaacaatattcattggatagcttgggataagctttgcacactcttttctgatggtggcctagagttcagaacatcggaagaatttaatcttgccttattagcaaagcaattatggcgtctaattaggtttcaaaatcgtctccttagtcgggtgttgaagggaagatactttaggtatagtgatcctatacatataggaaagactaactgcccctcttttggatggagaagtattatggcagctaaaccacttcttctctcgggtctacgacgaacaataggctctagaaggcgaacccgtgtatggcaagatccttggattccttctgtccctgcaaggccagcaaaaagtattcttaacataaggaattcacacctttatgttaatgacctaattcacgccttcaagccttggttgattcttctgatatcactttcattttagggattaggccgagtcgtacttacaagagtgatgccgacagctggtattatactaaatctagtaaatatactgtaaaatccaattattgggccgcaagagacctctctcgtcctacttgtgatccccctttttagggacctagtgtttcaccgcttcaggcacaagtatggaaaattaaaaccacgctgaaatttaaacatttctccttgcaatgtctcttaggatgtctcaagacaaaccaatgcctttttaccgtcatattggcaccaaaaaagggtacccttgatgtggagcagaggaagaatcaataaaccatcttctattcttctgtccgccatcacgacaaatttgggctttgtcccctatcccgtcctcggagaacatttttccccgaaattatctcttttataattttgattttcttctctggcgcggcaagcaattttgtatagaagaatatatacttggtattttttcatggataatatggtatatttggaagagtcaaaactggtttatttttgagaatgtcactgaacgtccgcaagagactcttggttttgcaatccaagaagcaaaagtttggagtcaagtgataagatggctttttagcccattctagcaattgttttcttatgtttcatagagaatttggtgccattctagcgccaataagaggagaaacacgtattctaggtgccaagaaggtttcaagagttttgaagctaagagtatcaaaaggcgatcattccaatatttcagaagtttagcatccggccgaggtcttccccaccacagcaacaagatattttggtatgcatggaaagctaaaagagtaaagattaacgtcgaagtcgaatcaaagcaatccatgaagccgtctgtaagatatgactcaaagagtgaagacatgtcaagaaccggccgtttgaaaataataaatccaaaacacatccggccaaggagacttgaactcaggcagctccgagtagctcaccaccaaccattaggtgacgcccaagtcctttcctctttgtgccaccatcattaggcttcttccctgaagcccacttcttggcccgatcacttacttatcggcggaatgacgttcgtacccctaaacctaattcttggccctagagtataaatacttgttctaagccctaaacttaagtgtgccttcatcacaagcgaaacctagccgtcgccgaaagctgccaactcgccgccgcacctcttgaagcttgaaaatcactatctctctctttctctttctcgttttgtgtaagactctttaaggtggaggtttgcctcttgtattctacattcaaagaagtaatctctaaacccttttgaatttttattcatctttttgttatggtttactcaacccaacttttgattagctcctttgccacgagcgagtagatctctagttttgtttgagggggtttcaaaggggaattcatggggacttttagatcgaaagtctaggttggcggtttctatggctttgtttgatcgtttaaactattctttctagttgagtttaatattaatgcatgttgatatgtctataatttgcatgatttaggcattcattcttcaccactttgtcattgtttcatccacatttcatctcattaggagtcgttttagtgtgttttacatacttaggacgattttgcattaggattgcatgtgcatggcatatttggttgttttcaggtactttggatgcttttggagttcaaacagaggaaaaacagaaacatgaagtcagaatgcccaatgacgccttcagcaaaaaaactctatcgcagcctcggagccctgccagggcaaatcactctatcgcaaccccggagaagcaagcagctcagtttcactcaatcgcgaagccggaggaatcaccccatcagaaccactcgatcaccactctatcaccaggaagcctatctgctcattctgcactcaaccagacaagctgagaacaaagaagagaagagaagccgaagaaaccactcgatcacaccctcatgacatccactcgatcgcaatcgatcacaaggtcgctggaccattcaatctcgacttcactgcatctcactcgatcgcaagacggagcccctgaagcccagtttgatcaatgacatactcgatcactaggaagctcatttctgcccgtcagatgccaatgacatattcaatcgcaggatcatgacgtgaagattcgctatatatttagtttccttatttgttttatttctcgcttatataaactgcctcttagggttttccctagggcgtccgctattatccgttattatccgctattatccgtttttatctcgcttttacattttcgcaactttgatagccgcagtgtttctcctgcgactttgtagtttcgttttcaagtatttgatattcagttttcgtttaagtctttcgtcatttctgttatcatgttttcaattgttgctttgttattgtctttgattatgtctgagtagtgaactatatttctgaggatgggatagaatagttgtggtttacttggtcgttttaggtggttgagtttagaatactagaatcccttctggattagttgcgcttattgcttatttcactggctaatgtggagtatgagtccagacgtccagcgctcagaaggcgtttaatgggcgttggatcctattaattccatagatatctgactctactccaagggattggctgtagagagggtattgactttaacatgttgattcgataatgcctgcttagttagagatcgctaaagggatttaggtcagtgtctagctttgcttgaggatttctatcacgggagtgaattaatctgttgttgaacttgttgtctagggatagcttctgtgaagttttgtcaaccgcctgaatagattaagtagaccacactattcgattaccccatccttaggaatcgtttatccatttgattgcctgttatcatttctgctttgtcattcacttgcctgctattgccattcctgcttttagtttcatttcatttctgttattgcatactaggactgttagaaccaaccaactatcttcttggcttgacttagagctttctgatcatatctcatctgtttgcatcacaccggattggattgacatcctaaaatactacaacgacaagatagtgttttcgggattaattgacaaaatcctactatcacatgtatggccgcaatgccacctagtacatgatcttaggtattttatacttggtagaatcttgtataattgcctgaagtagctcaacagaataaagaactataaccgttgcacgcccgccgagtcatagggacttgtggactagattcaaatttgaacttaatgctttgatcttgtattttgaaaccatgttagcacctactagccgttagggcaactgagtacgcaagatattagtgagtatagccagttttcacctattaaccgttatggttagctggtcttgatagagtttcgtatgtctgagaatttggaagtaaacaaacctagccatgttatcacctagattgagatctatcccttattattgaaccatgaaatccggagaaacccccgaagacctaacacttctctcttattgcttaccgtttactttagttacttgtcttttattttggttacttactgcatacaacaaccccgtctctttattttggtcctagcttcactctcttcttaaggatttctctgaactacttctctccttgtgaattcgatcctaaaatactactccgatatactgtgcacttgcagtagtcgtgtggtcattaaggtaaaagcctaaggtgagataaaacatgaatcaagctttttggcgcttttgccggggagagattgttagttccacaagtccaagaactagagtgaactctaggacactttgcttttaatttttgtttttgtttttctttgtttcaggacttaaacaatgaatccaagaaattatcccgatagctactaccctaatgtgaatcacggctcaaaccacttatcccatttctctaccggccactacaagcccgatgcatcccaaatgcatggcgtgacttggcaatcttggtcgtctaatggaggagcttacaggaccgatcattactctaatgatcaatctgccaccttcgttcagaaccggccgcaagctaaccgctcgattaacccgttccaccattgcgtctcatcacctagagatcaacgcgtgggaggacctcactcttctcatccttatggagttgcccgccatgaagatttcagctatgaccaatgatacttgcaagaggtgatgagtatagatgttcatccgaacaactatgcttaccaaactaatgagccctacaaaaatttcgaggcggaagataaactcattggtcatctccaagacttcgttgatggccaccaagaagacgtgaagaggatcggctcaaaaatgtcggagatgaaggccaaatttgaggagaagtttgatgacctcactaatcgactcgaaaatatggagggggcacttgttgagatcaacaacgctcttcttaaccaccaagacgatatccaagaccaatatacgagaatcgtcaatgtgggactcgtcgttgatacggttgagagtcatttagattggaagattgaggagttagaaaagaagctcaataactcaaatgagttttcggaatgagaagcaaccaatcttgccaagaagaagatgagtttcctaaggcccaatcccgatatgaggaggaaacgaaaaaggaaattgaattcctagtggaaaaatgaaaagacctaatttcctattccaaaaaaggaaatcttgaccttataaaacctctagggattcgtccctcgcgtttctcctcaataccaaatcgagcaaaaagataacttagaagaagaagaagtcgtcccttttgaagtagactcgatggccggacacaattctagagaagaaagccttaaaaccgaaaaggaagaagtttgccttgagagacaagtaaaccgattcgaagaactttccgaagaaagtgatgaactcaccaacttttctagtgaagaaggaaaagacgaaaacaagtcaactagaggataatgacacgaaagaagatgtaactttggaggacgtggttaggagacaaggcgaagttgaagaaaaacaagtcaagaatgttgaaaatcaatcacacatccgagcatcgcatagaagggtaaccatggactcttcaaggaaatacgtaaaattacttgataggattcttgatttggataagaaggttgaggacttatcagcgcgcattggagggaatgaacttatggagagcaaagaagaagactctagccctcatgtgctttgtgacgcggtcacaacctaccaagaacttcacgaccttgaagaaggagaatcgacgaaagggatgaggaacctcccgggagaacaagcgtttacaactggctcacccttctaaaggaccggtggcatccacgtatgatagattgggaagacttggagattttaactgagtcgttgctaagctaccacgaggtacacccttttctaaagcttgttcggcttaccatattgaccatttctttcttgagagttgtgaaacaagaagagaaataaaggaactatatgaggaagccctacaccacttgaaaccgttcaacactcttcaaaagatagagagtctgggaagattccttatgacttgttctatacgaggtgttgaattcaaagatgccctatgcgattccggatcatgcatcaacattatgacaaagtagacatcaaagaagctcgggattaaggagctacgacctttggatgtacagatcggacttgcggactcgtctttcacggttcctgaagggatagttcgcaacgtttatgttcggatcggaaggtgcaatgtactgaccgacttccatgtcataaaggtcgagaaaggaagacccacccagctcatactaggaagagcattcctacccatagccggcgctataatggattggcctaatcgaacggtatgcttcgccaacattgatgtcgaagtatttcacgagattgtaccatttaccccggccgcaagaaggagaaggaagtcatgtacgagaactcggaacaactacccgaggaattccaatccaagagagctcgcctagggaggaacaacccgtcttactacgcctagtaagacccaaacgtcgagccaacgacgttaaacaagcgcgctaagtgggaggcaacccactgggttactttttccttaggatttgattttgcttttgcttttgcttttgcttttgcttttgatcatttcagtatttgtttcagctttttataaaaaataaaaaataaatggaaaaagagaaaacaaaaaaacttaaaaagaacagaatgaaggagggttacctggccccgtcactaggcaccgtgacaacccgcccgactactcatccgagtaaccggtgccgcctggagaagtcagcccaaccgtgtcaaactttggttggagctcgccaatgcgagctgacatttagccggagtccgcccgagtgtgccacactttggcctgagttgcccaccagttcgggcaatatactaccaagcctgccggtctggccaaacctgaaatcagccggccaaaacttggccaacaacggccacacgtgaattaataagggaagttgcaccgtcacggccgatcggctcgccaattgattcgtttaacccgcaaccattctgcccatcccaacgaccggcgaccccatccaacacccgaccgcttattgcccacccactccacccttttggccaagcaccgcaactgcctgccatccattcacaccatccgtcaccatgattttgatcgtatttgtggccatattgacaaaaacaagatcaattctatcttaggtatgtttttatttattttgttttgttatacctattggtggttttaggttttgtttcaaggaagatgcgaatggagattaataacatggaattcgacaatactaagccgagtatggccgatgttaagctaggagagaggtcatccggttggtcaccacaaccaaggtgacggtgtgaagtaagtctagggggttaatgaatctgttactactaatgctactctctattttgttgacttgaaacctttttccactttctacatcaatacgttctaacaaagcaaaaagtttttcttgaatatcgagtaatgttttattgagtcaaaactagtagggaaccgtgatcttgttatatgatgattattgaccattatgtgttgagaattgtttcttgaggaacacttacagggtcgcaaggaacggccaatccggaacactacacccggaccgtcccccgaaagtttaaccccgcagaaattcctgttggatccgatgtcaactctacactatattggacgattaaccggaacttaattctttttcatgaaggggtgttagatcggggaaacgagcatatacattcaagacttcttatccctttttaccactctctgttgatcctgaatggtcactcacttttagtggttcctacccttaaaccctatcctctttttaagcctcatgcattctcttttcctttttcctttagcagatatgtgcaaaacgtcagcgagaaaggaacaacacagtttcctgccacaaagactaaagaaggaagtaaaagaagagattgcaaccaaacgtcctaagagcttattcttccttggaaccaattcgaaaggtatgctcattaaactcggtgattaaaagttttgtttccccttccaaaaaacaaaagaatataacaaaagaaaataaagaaaaaaagagaaaataaaagaaaatggaaggaaaggaaacattacaactaagagagtctagtagcatagttccaaggaaagacatggccacctaaaggagagatgagccaattacagaagagaaccccctcggaaatacctaagtctggggaaaccgaaagtaagaaagaagtaaaggagaaggaggtgtttaaaagaagacttggttggaaactgtggacctcaactgatccgttctctcttgcggttatgcaacatatcatgcattcgagactatacggttaccgtaaacacttcaactccactacttaaacaccaaaatcccctttcataccaagcgtcgtctaccccgaatgacaccttctaatgaaaaagtccatgccaaaacatttaaagaatgtaaagagttgactgacgtgaattcatagttatgtaggatcaaagcggatgcacaaggacaagaaaggtgtaggactattgagcgggcgttctaacgtaacttttgtttaatgtggtctgtaggatatattagagacacggtcactgataacaggagagttcccacgatttgcaaacctatccaccagatttgttcttttatttgcttcaggacaagcaaagtctaagtctgggggaggttataacacggctttttagcccgttctagctattgttttcttacgcttcagagagaatttggtgccattctagagccaataagaggataaacacatattctaggtgccaagaaggttttaagagttttgaagctaaaagtatcagaaggcaatcattctagtacttcagaagtttattatccggccgaggtcttccccataacggaaacgagatatttggtatgcatggaaagcgagaagagtcaagattaaagtcgaagtcgaatcacagcaatccatgaagccgtttggaagatatgacctgaagagtgaagacatgtcaagaaccggccttttggaaataataaatccaaaacacatccggccaaggagacttgaacccgggcagctccgagtagctcaacaccgaccattaggtcacgcccaagtccttccctccttgcgccaccgtcattaggctcctttcctgacttctcggcccgatcacttacttatccggcggaatgacgttcttacccctaaacctaattcttggccctcaagtataaatacttgttctaagtcctaaccctaggtgtgccttcatcacaagcgaaccctagctatcgccgagagctgccaactcgccgccgcacctcttgaagcttgaacatcaccatctctctctttctcttcctcgttttgtgtaagactcgttaaggtggagttttgtctcttgtattctacatttaaagaagtaatctctacaccctttttaagtgttattcatctttttgttatggtttactcaaccgaacttttgattagctcctttgccatgagcgagtagatttctagttgggttggagggggtttcaaaggggaattcatggggacttttagatcaaaagtctaggttggcggtttctaaagctttgtttgattgtttacactattctttctagttgagtttaatcttaatgcatgtatgtgcggaacgccacctagtacatgatcttgtataattgcctgagctagctcaactgaataaagaactataaccgttgcacgcccgccaagtcatagggacttatggactagaatcgaatttgaacttaatgctttgatcttgtattttgaaaccatgttagcacctactagccgttagggcaactgagtacgcaagatattagtgagtatagccggttttcacctactagccgttagggttagctggtcttgatagagtttcgtatgtctgagaatttggaagtaaacaaactgatatagctcaaattgccttaagcttactccctcaaataagagatcgtcgttagcacgtaagggtcaaattccactgagctctcgatgttcacacaatagacttatgatgttgtttaataagctaagctagatgaagtaattgaatgtaaaagataaataagcaagtaaacgagttgtagattcaagtgattaaagcgtcaggtctaaggaattgtctcgggagatagataaattgtagatctagctaatattagtattgttatcgcaccgttctcgaactcaaactatgattctagagtaaccggtggcgttccgctaaattctctatacttagaactaagataaccagagaagccgagaaatcttatgctaaagcatgcattgttattaagcttgattagttcaccttgtatctaaaccagagcccttctatgagcctacctgttctttcttaaatgcctatgctcatctatgatagttataataacaagtacctatggcgggcatacctattatctaatatcaagttctaggtgaccaatctaaaactagcaattagaataatcaagatgaagaactctaagaataatcctaaggggtttccgatctactaatccatctaaatccctattgagactccccaaacccaacaaggtgattactcagacatgataatagaaacacaaatcataatctgaatagtttgcgttgatgaattaagaataaaagtaaaggagttcagaatcctctctaaaaggattggattcttctcccaaaatgtgtaacaatctctaaaacaaaacttaggtctaacaatgaccaaacaattaggtatattcgtgactaaaacatgcagggactactttgcaaataaggaagacttcagggcttctcaaagactttgcagtaaacgagaattcccttggcagcaataagagtgtcgatcgacaccagcttctaaaaaacgtccttcaagatcttcattgctgaaaagcttccaaaattccttattgtgctccatagttcccggatgtgtaagtgtacctgaaatgactcaaaacatacgaaaaatactagaaagactctaagaaccattctgaaactatgttagaaatcagtaaaaaccagaacatatcacaaacctagccatgttatcacctagattgagatctatactttattattgaaccatgacatccggagaaacccccgaagacctaacgcttctctcttattgcttaccgtttactttagttacttgtcttttattttggttacttactacatacaacaaccccgtctctttattttggtcctagcttcactcgcttcttaaggatttctctgaactacttctctccttgtggattcgatcctaaaatactactccgatatactatgcacttgcagtagtcgtgtggtttttcaggtaaaagcctgaggcaaaataaaacacgcatcatcaagcatgctcaaaagaattggtttctgagtatcctccccctctgttgaaccatgttcatctccccctagatcgaaatgtttgtcagttcaatgcatcttggcatttagacgacactctgagtggacttggatgggttctaatagaccaagacattgttcttcatttgggcctcaagagtgcgcgtaggggattatcaccacttcatgccaaagttgattccttgctacgttgattccttgctatgggcaatggaatttatgatctcaattggagttacgagtttctcttttgcttctgattgtgctgatcttctctcttttcttgacaaactgtcaaagtggcctacctttgtagctgagatggcgacttttagttctcttgtctgttttttccttcttttagtattaagtttcttcctcgcctttgcaatatacgggctgattgccttgcaaaaaaggttcacgctcgtaatagtttgtttttccatgtaagcaagttggttcctaaatggctctctctagaagagagtctcttcccgattactcaatagaaatggtcgctcgacgaaaaaagaaaaagaaaaaaaagaaagcaagtgggaagaggtgtatcatattatcagtgatggacctctcaatcgaatgggggagacccttcttgttgttggaaatggagtacaatccctgatcctaagcaccttttttgtatttttgcgttaagttggttgcattgacatttggatgatgacaatgcttatagtcatgatatgttttcttgcattatgcaagttttaaatagtagtagctagaacttttccttttagattggttgaagattcatgatcgaattattactcgtgtcctatctctaagaacttgttactaatcttaaattgttttcatgaaaatgaataaagtctatgtgatgcctttttacattgtgttcatttttcttctaaatttgctttgatgctagaattgctttaattatgcaattgttaattatgtaacaaacatgtcccccatttaaaaaatacttcgggtttttataatacaaaaccttttacacctacactcaatatatgtggtcgcatatatatttttgcaagtcttattggtggaagatcaacttcatgtatatgaaaatttccattaaagcaataatataagaatcaaaagaataaggtcaagtaaaaaactaacataaaaaatcaactttcaataatccaatagcatttctcatttagctatttatttataagacttagctaacaaccaaacctcacgacagacatatttatagaatacaaaagatttatgtaacacaacttcacttctgtatttgagtaaacatattatttagttttggttgtttatctaagcataaaacaacaaattaatactaatttggtttgaacatcactttttataaataaaaaaattaccgaaagaatgacacttctaacgtaatgaaatagattaaggtgatagaaaaataattgaagaatgtttacaatggtcacaatcgagaagcacaaccaccatttgttttcatatctttaagagatcttctagataaaaacattagttaattcattattgatgctccagaagaactattcctacgatatgtttctttttgtcgaaaatacttaaaaacaggagaatttgttttggagaaaatagaagagatcgcatatatattagacatattgttctatgtttataaaagaagtcattgggcacactaattttgagtatatgcatcttccgttgagatagaaggcttctcatcatcgtctaagtataaccttcctcttggtgaagcacaatactgatttgagttcatgtgactcttcatcctacaattcctgcctattgtggttgcttcagccattgttctatgtttcataccattactgctaccaccagaccgtcttaagccattcgaatcaaacaatacttttcatttacaaaggacatcatggtgaggaggaaaaagtgcaatcctcgagtcctttacatttaaagcatcatcatatcttctcattcacgaaactccaaataagataattttgataaaaacataaactttagagatacacataaaaagttttagaacccaagattttgattagctccatttgacaaccgaaaagaatagacaagtatcagcttcaagaaaagcttaaactgagtaatctcattgagacatttaataaaacaacaactattgccccctccttcattgctatatccatatttgatttctcatctttttatagtctttattataagaacaaaaaaaaaatttggagtagatttctgtgtgatgagtgataaataaaacaactatatatatatagcaaacatgttagtgtatttattatctaatgattaataataccacattataatcattcatcacattaataatacccacgttacaaatggcatgagccactattaatatattgtatttgaatggagtaaatggttaatgtacatttattgtaatagaaacgtgagttataaaatattaagctacttcataatgggagttacgatttttaatgtatatgtgtattatttagtaaaaaaaaaaagtttacaaaaaaaaatgattttgataaaaaaaaatttggcaggaaatttttttggcgaaaaaattttgtatcggaaaaattttgttggcgggaaatttatttttttagaaacttttagtcggaaaaaagtcaatattttattttggtaacctaaaacatttttcaaatatgggtaaaatggtcattaaaaattaaaagaaattataaatgaaaatgacaaacagaaaagggcataattgaaaaagggtagtgttgaaaggacattcttagcaatttttctagttctaaatgaaaaaaaaataaaatcatgtactgatatagcatatttattttataatgaagtaagaggagactatccagacatcatttaaccaagactacatctcgatgaaaattacatggatgactagaaaatctgattaatgatgtacatgtttatacaatatctttaatttgatgaaggaacttatgttaattttaaattaatttgtgtgtcgttttgcattcatgttgtaatatttgcattcatgtgataaattttaaatataaatataaatataattttagataataattcacaagacctaatagatacttttttctaaaataaattcttagtttataataactatatcttagttacattatttatatatcatatattttaaaactaacttaaaatatttacatattttactatattactttcaatttctagtattataatagacaatcatcataattaaaatttattacacaatcataatttatatgccacaaattagccataacctagccctggaatttcggaaagaaccgattaaagcgacccggttaacccaataattttggttattgtcgttgaccgaattgagcaggccaaaccgaacagcaaaattaatttatgtaatcatatatcggttcggatcagttcggtaatcggagcgatcgggtttgttcggtttaatagcttattaagtagtggtatataaacctaaccggtaacctaataaccctaatttcattttctcatctgcttcgcctccgtagccaattgaaggcgattccaagagagatttcactcatccgttcacctttcttctctattcatctcagcgtgatctaatctactcttgactcttctgttctggtgtggatcttcgttcttagcctcgtcaaaccgaaaaatttctcaaagttctcaaaagttgaagaggttagttcttcgttttcttcttgatagctacttgtctaattcaatataatgagatctttttccgactcataatacatggatataagtgggatcaaaaaccctaaatctcttcaaatcgtcgatattgagaattagtgtttcagattccacttatcatcgagaaattaagagttcggtttttgtttgtatttcttctctaatgcgatcgtgaaatgttatcatgtgaaatccatagtttgtttattgctagtttaatgtttatggtcattttgttagagctaatggtatatgctttgctggtaatgtgtagatgactgaagagctgcaaaacaagaatgaacctgaacctctagttgagcctcagcattcaatggaggttgaaagtgggacgaaacgtccgagacctgcctttggtcctaataagcctaagaaaccccgatagaagtatgctaagagagctgctgtttgggaacattttctgcagagagatggagatcttgcaaagagctattgtaagtattgtactgcagaactcgcctgttattcaaaaacaggaggtactagtcctatgattggttacattgcaagatgcaaactatacaaggattggttaggaaaagaaaaacagaaggttataactggtgataacaataggaatatgaagatggtcaagtatgatccgcttatgtttaggagatcagtgaatgagatggtagtagtgaatgagttacaattctcatttgtagaatctgagggttggaagcggttttgttctaatgtcttgcctctgaacaagacattttgtaggaagacatgcagtgaagacattgttaagatctatctggaagagaaggcaggtttgaagactttgtttagtgttgagaaacaaagggtttcattgactaaagacatatggacgtgtcccactacttcatatagctacatggtgatcacaggtcactggattaatactgattgggaaatgcagaagagaatcctgagttttaaatcacagatcataagggagacaccatagcaggtcagttgctggattgtttagaagattgggaaaattgagagggtgtttacagttacagttgataatgcaagaaacaatgacacggctttgggtgcttttaaggatgggttaaggctaaaaggagtacacgcattagttcaagataatgagttcttgcacatgtgttgttgtgcgcacatcctcaatctgattgttaaagatggtttgaagaaggcaaagccacaagttgttgttgttaggaatgcaatgaagtatgtccggtccaacttcagtaggcttaaatccttttctttgaggtgtgagacaggaaagttgtgtagaggcagattgccattagatgttgtcacagggtggaactcaacatatttgatgtttacttctgctttaaagctaagagtagcttttgggaagatggaagctgaggaaaagttgtacagtaagtattttgaagaatatgaggatgagaagaagatgactaaaagagttggaccaccatctacttctgattgggatacaattgcagggttggtcaagtttctgaaaattttctacaagtgtactttaactttctcttcttcaaagactgtgtcttcagctatgtgttacaatgaaattgtggacaatgagaggaatctcatcactaagtgtggcaatgcagacaaagcgaccagagatgaagctagggtcatgagggataaatttgacaagtattgggatggatttggaaacatgaatcccctactaatttgtggctagtgtctttgatcctcgcaacaagatgaagtttgcttccctctactttgaccagttgtatggtaaagatacaatagagagtaggaaacttaatgctttggtttctagtgtagtgactagtttgtattaggagtactgtttcaagctgtgcaaaccaatagacactgtattaggagtacagtttcaagctgtgcaaaccagtagacactgaagaagatcaaaccgattcacagcctcatcctaccaactttgagctatcagatgatgaagatgattgtgagggaatgcttgcattatttgataaagcggttgatttgaaaggtaatgaagatagatgcaatgagttacaaatttatttgacagaaaaaaactaaggctagagtagaaaataagttggggctgccttatgatattctcagttggtggagacgtaattacccatggttccctatattgtcagaattttctagagatgttctcgcaattcaagcctcatcagttgcctcagagtcagcttttagtacaagtggtcgggtgttggatccttataggtgataataggatttttactcaaataatcctaaaacacgatcctgtcgttgtagtattttaggttgtcaatccaatcccgtgtgatgtaaacagatgagatatgattagaaagctctaagtcaagccaagcagagagttggttggttctaacagtcctactatgtaataacagaaatgaaatgaaactaaaagcagaaatgataacaggcagtcaaatggataaacaattcctaatgatggggtaatcgaatagtgtggtctccttaatctattcaggcggttgacaaaactatccctagacaacaagttcaacaacagattaattcactcccgtgatagaaatcctcaagcaaagctagacactgacctaattcccattagcgatctctaactaagcaggcattatcgaatcaacttgttaaagccaataccctctctacagccaatcccttggggtagagtcagatatctctagaattaataggatccaacgcccattaaacgccttttgagcgttggacgtctggactcatattccacattagccagtgaaataagcaataagcgcaactaatccagaagggattttagtattctaaactcaaccacctaaaacgacaaagtaaaccacaactaatctatcccatcctcagaaatacggttcactactctgacatgatcatagacaatagcaaagcaacgatcgaaaacatgataacaaaaatgatgaaagacttaaacgaaaactgaatatcaaatacttgaaagtgaaaatacaaagtcgcaggaaaaacactgcagctatgaaagttgcgagaatgtaaaagtggatgaaaaaacgagatgccctagggaaaaccttaaggggctacttacataagcgagaaatgaaacaaataaggaaactagatatatagcgaatcttcacgtcatgaccttgcgaccgaatgtgtcattggcatctgatgggctgaaatgagctttccgtgatcgagtatgtcattgatcaaattgggcttcaggggctccgccttgcgattgagcgagatgtagtgaagtcgagattgaatggtccagcgaccctgtcatcgagtggatgtcatgaggtggtgatcgagtggatgcttcggcttctcttctcttcttcgttctcagcttgtctggttgagtgcaaaacgagcagatcgagtgatcgagtgatgatcgagtggttctgatggggtggttcctcccgcttcgcgattgagtgaaattaagctgctagcttcttcggggttgcaatagagtgatttgccctggcatggctccgaagctgcgatagaatacttttgctgaaggcgtcattgggcattctgacttcctgttccgtttctcctctgtttgaactccaaaagcatccaaagtacctgaaaacaaccaaatatgcaatgcacatgcaatcctaatgcaaaatcgtcctaagtatgcaaaacacacaaaaacgactcctaatgagatgaaatgtggatgaaacaatgacaaagtggtgaagaatgaatgcctaaatcatgcaaattatagacatatcaataggagttctttaactccttacatggttgaggttttgctatgcccacaacaatggttaaggtgttcttataaaaaagaggatgcaatagcaaacttagatcaaatgttagaagaagttgatttctttgaatctcttggtaagtttgactaactctttgacttagtttttttcttttttctcaactgttgaagtattgataacttttgactctgttttcttttgtagatgctcgaaattcaacaataactcatgtctagattcttcatagtatggcaggtatgattctccggatttgggtcttaaagtagcctcagtcctttttgattatgatttgaattacgttgtcatgtccttgttatgagtctcacaggtaggtaggaagctgcacttttgtcctttttgatgcagaagaacaacaaccttagatagtactaactttgagttgctcttttgacaactttttgatgcagattagcatgcttttgagaatctacaactggtaagctaactactaaagcaaacttgatatttgtatggttctgttatggttttttgatgtaatgctagcttcttgatacaatgctagcttggcagcttctataatggtatgtaatattcggtttgtctgtactagtagcttaaactaacaaactcagcttaaggctactagtacaactttatgtatggttttgtaaggtttcttctgtttttgtactttttatgcttgttcgggatataagaaccgaattattgacaatgtttgcatgttttcagaggcaaaataaaacaagaaaactgacccgataaaaccgactatcgaccgacccgataaaaccgactaccgaccgacccgaaacaaattagaattcggttcaactcggatgagaatatgaaaacccaaattttaagcaaaccgacccgaataacccgaataatccgaagtcacagggctaccataacctatcatcatcttaaaaaagtttcaaatactattattattttacataacattaggatgactcatatatttaaataatgactcataaacttccaaataattatcttcaaatttaaataaacaattagatataaaaatcacagggaaaatttttaattttccagatatattcaaatttgtggcatatgtttctttcctcgaaaagaggcctcctattattgggcctaccttctaaatccaacaatctattgtcaacaatgggttttccaaatcttttcctaaaacaatgacatgtggtgctttatttacatgtcaccgggccaaaaaaaaaaaatgacccatctctacccatgccttaacacgtccacaattaattattaggttaacatcgagtctttctttctctccaaaaatgctaaattgtgttatcaaatcagtccacatgtttttttaattccaaaataggcctccttctattgtttttggactaagttctcgacacaattatgaaaagaagaaggtgtccatccattcacttactcatcttcttcaatgtatatgttatgaacaccgtcgccgttatcgaatcactccaccaaccagaagctcaaacatcaatagttattcactaaaaggtacttaatacatagcttaattcctacaaaattctactacatacaacttaattcatacttattccattactcataaaataatcgaataaaagaacaataaataacacactaaacatatcatcccaaagttatttagccactttaatgctattaacaattatattaagaaagagaagatatgtattatcacttcaacagataaaaccaacaaccttcgacgacctaagagaccttgataacacatgtggccaaagtttctactacaaaagaaagtataagtttatcttcctagtataacttaaacactacatctacagagttggaatgtctgcttttaatttaaaagaaaatttcaccgtgaccacctttgtcagtttttctttcaggaagaggcaaagtgggcttgtgatatatcccaatttttactgattttatctatgttttaggtataggattttgagtctttatgttatttctcgagtctttttagtgtcttttcaggtattctatgcaatgtgacaacaatggagataaggagatattttggagcaaaggctaaggaaaagaaagcgaaggacgattttggttcaggaatcagcgaggagtatcgatcgacacactcttggtgtcaatcgacaccagtttcggcccagcaaaaaccctagacgctttcgagtttacagaagatcaaatttgccccagaagatttccctatttgcattatttgtccctggacgtttttagggtctatatatatattgtttttaaacctaagtttcttttatcaagtcttttatcaagttttctacaaaccctattactaagagacataagctattcatcgattgttttctcagagtttcattcagatctatatacagtgaagagatcccttctttccccttctctatttactgtgtttatgctttcacactcaaatatattgtttgcttcatccaatatgtgtgagtagtctgcttgttgggaatagggtttctcattagggattcatatggtttagtagattgccccctttgctaggctatctatagagttcttcatctctaattatgtttaatgctagatctagagtaattaactagatcttgaatccagacaatagatattcccgccataggtatctgtaattggatctattatttgatgagtctggtttataggtgtgtaataagaatcggcctatctactaagatgaacaattgaactcgttaagaattcatatttaggttgatagtttctcagcttctccggttattattagctatagatatagggagtttcgcggcacgcccaccggttattccataattagagtttcagtttaagaatggttcgataacaacctagctttcattagatctactaaccaatagtttcctgagaataccttgttcctatctttttattaaatcgtttacaacacaatcaatctgctgtctttttactttgttctcttttattttcactattaccctgctagcttaatctcgacatttaactcactgtttgaacaaaagaactccgtgaattcgatcctaaaatactgcaattgatctcttatttgagagagtagttctaggtaatttgaaccatataagctgggccaaccaagttttagccattcggcccaaaatggacgaatttgccctggaacgagaaattaaaggagccggttcagttttgtgaactgttttctggttacagaaataattttaaatatttaaaattatttcaaaagacgtaagtaaataattttaaaacttaaaataaaatcaaaaactgtcttcgagaaacgcagaacagttccgacgaattccgttttcgaagacgcagagaaattccgaagaaacttaaacccaattccgattgaggctctgttcaagttcgagtctttgcttaagtggaggaaatttcgatcgagttcgtgttaaagtgtctaacaataagacgatttttgggtttatcgattaaatgttcatagaagaactcaaacgggggagatgaagaagagtagtcggcggctaggagtttcggatgttaattgagtcatcggcggcgacgacaaatttgggttagtttgccctaactttgtttggagaatgttttgattcaaaatctaggttaattttagagatttcaactcaaaagttttcaatgacaaaggggttttagtgttttctgccaaaaacagttgattgagtataaaattttcggtgtacgtgtatatgaatatcgagtttatgtttagttggtatttggatatagtgtacgtgttaagaacttcttcgttttatcaagtttcaggaagtacttctaaggattcgggtgaattaccacagaggttgtttgcactcgaccactaccctaccaaggcgaagataaatgcgtactccagaccggagtacattggtcaaatagcagctgcgcttaaggacacaccagaattgacgttccttctagagtctccatttggtgacctctttaggatccctactaacaaggcatcttttctggtaaacttgttcttgggttaatatgtcgtcagttagttacaaagaaatgttatgagatgtggatggtattcggtggtcatcctattaggttaggattaagacaatgggcacgtataactggtttggaatgtggaacctatcctaaaaatagtgttgtagaaactgttatgcttatgcagcggaaggcaggtgaaaaaacagtttggaatactctgtttggatctgctaatgttaatccaacagttgaagatttaagggatagattgatttctgaaactgacatgcctccatggaagaaattagctctcgccctaattattattgtggttgaggtgctaatatgtgacacgtctcctcccctgagaccaaatgagatgacagttgagctgacgaagaacctggatttcttctgcaaatatccctagggaaggacatcatttctccttactttggatcgttgcgcaagtttcaaagaaggagagaccgacattgaaaaactccggaatggttgcaagcaacaatcttatgcactccatggcttcccacttggactccaactctttgcttttgaaactatcccgtctattgctagtctcctaccttctgaagaagataccgccgtctttacggagagggctattaaaaacctttgcaaactgcgtccaatcaagacatccaccatatttgcgtgcgaggctgctgaacaggtttgtacaattgttgttgtacgtacattggtataaaaagatgaagtacatacactctgaaattaacaatgattatctatgtaggtggttataacatatattgtggactcagcagacaatgattgcccaaaatctttggtatggaggaaagaaaaacaggacccaagagttgataacattttaaggatgttgaaatctgagcaagagtgggatgagaaaatgtgggttggaggcgatgatgagcctaagaagcaagtccggccctcaataacaggagagagaggtaaccatttctcttcatcgtataacttatatcagaattaggttcctccaagagtagtaatgcatgattaaaccgttttatatagttattttgaagaggcaaagacgggtgccagattctgttgaaaacaaaaaaaaggaaaattacccactctgatgatggggaaggtggactcagtggtggtgatggttctggagacgaagcgtttgataagtatgtggtcgaattgaggcgtttcttcaagaggcaaaaacaacttttggataataaatttgaagatttaaaagaatttgtccgtccagagatacgtgctgctctacattctcaggaccgaaacgaagaaggaacacgagcatcccacaaatctgattcaccatctgagaaggttgagatggtgaccaaaaagtttgagaaggtgaacaaaaaggttcaccaggtagctgaacaggtacagaagaaatcgcttaagaaatccatcaaataaaataattttgtaccaagaagatcttccaggttgaataatactcccaagaaggctggaactgttagtcttcctgttgaggtacgtctacagcaggtaccttgtgtaaataaaatttaaaaataggtttttatcaagtgtacgtacaaccaaatacttaggaacgccttctattggtgtatattccacagaaggtaccagacaatgatggggatggtgaagtttcagccaaaaaacaccatactgtctctgactatgatatggaaaacaaatttttgggtcaagcatcaccacctgaacatcactacaagaaaacagacaaacgacacactacgaaaggcgactaacattgtagtcgtccatttttgcgactaacttacgactgctggacgacgactttacgacaacaatacagttggtcgttacatagtcgtattttagcgactacgatatttagtcggtacatggtcgtccagttacgactatccgacgacaacattactgagaacaatacgtagtcgtaacttagtcgtaatttagcgactacatatccgactacagacaatagtcgtacattcggcgacgataatacgactatttttcctttgtcgtaacatagtcgcataattgtcgtataatatggttggaaaacgttttccgcgttgctgggtaggtacacctaatttctgagcgtctacaaggtttagtcgtataatagtcgtaaaaaatcctctatataatccacggcactcttcattctcattcaccaacaaatcaaaacaacaatcaaaagaaaaaaaaacgatttcgaaagaaaaatataagtttagtttatgctataatggcgggaaacttcaattatagtggtggagccggtttctatcgagattggatgtacaagagatttgatgaagtaacgggaaatttgtcagccgaatatatcgcaggagtggaggagttcatgacattcgctaatagtcagcctatagtacagagtagtcgaggtaaatttcattgtccttgtagtgtatgcaagaatgagaaacacatcatctcagatagaagagttagtagtcatttgtttagtcaaggatttatgcctgattattatgtttggttgaagcatggagaagaattgaatatggatataggagctagttacacggataggacgtattttagttctaatcctgaagaagtgggtaatgttgtagaaaatccatatgtggatatggtgaacgatgcatttaattataacgtggggtttgatgataattatcatcaggatagttatcatcaggatagtagttatcagagtatggaagaaccggtccgtaaccattcaaagaaattctacgacttgttagaaggtgcaaatactccattgtacgatggttgtcgtgaaggccagtcgcagttatccttagcatctcgactcatgcagaacaaggcggattataatatgagtgaaaagttggtggattctgtttgcgaaatgtttacagattttttaccagaaggaaaccaggctaccagttcacattaccaaaccgaaaagttgatgcgcaatttaggacttccatatcatacgattgatgtttgctcgaacaattgtatgcttttctgaaaagaagccgaaaaagaagatcattgtcgattttgtggcgcacaaagatggaagcctaaagatgaccgtcgaagaaccaaagtaccatatagtcgtatgtggtatctacctattggggaccggttaaaaagaatgtatcagagccacaagacagctgcagcaatgcgatggcatgcggagcaccaatcaaaggagggagaaatgaatcatccttcagatgcggcagagtggagatatttccaagagttacatccccggtttgcggaagaacctcgtaacgtttatctcgggttatgtactgatgggttcaatccttttggcatgtctcgtaatcattcgttatggcctgtgattctgactccatataatttaccccctggtatgtgcatgaatacagagtacttatttcttacaattttgaattttgggccaaaccatcctcgagctagtcttgatgtcttcctccaacctcttattgaggagctacaagagtcgatgcatacgatgtatcattgagtcagaattttaatctaaaagcaatgctactgtggacgataagcgattttccggcgtatagcatgttatcaggatggactactcatggtaaattgtcttgtccaatttgtatggaaagtacaaagtctttttatctacccaatggacggaagacatgctggtttgattgtcatcgtagatttcttcctcatggtcatccatcccgtaggaacaagaaagactttctgaagggaagagacgcttctagcgagtatccacctgagtctttgacaggggagcaagtttattacgagcggttggctaatgtaaatcaagcaaaaacgaaggacgttggtgggaacggtcatgaaaagaagatgccaggctatggaaaagaacataattggcacaaggaaagcatcttgtgggagttgtcttactggaaggacctcaatcttcgacataatattgatgtgatgcatacagagaagaattttcttgacaacatcatgaacactctcatgagtgttaagggtaaatcaaaagataatatcatgtcaagattggatattgaaattttttgttctcggccagacttacatattgatagtcagggtaaagctccatttccagcatatgcattaaccgaagaagccaaaaagagtttattatcatgtgtgaaacatgaggttaaattcccagatggttattcttaagatttggctacttgtgtagacatggagaatggaaagttttcaggcatgaagagtcatgattgtcatgtttttatggagcgactactgccatttatctttgctgaactccttgaccggaatgtccaccttgcattatcaggtacaatatatgttttttaatttgccacacttttttaaacctctgatttaacttaaacatatatatatatatatatatatatattagggattggagcatttttccgggacttatgttcgagaactttacagaaaactcgggttcaaattctcaaacagaacatagttttaataatctgtaacttggaaaagatctttccaccatcattttttgatgttatggaacatctacctatccatctcccatacgaagctgaaatgggtggccctgtccaatatcggtggatgtacccatttgagaggtttttcaaaaagttgaaaggaaaagcaaagaacaaaagatatgcggcaggatcaattgttgagtcatatatcaatgacgagattgcatatttttcagagaactactttgtcgatcatatacaaacaaaatcaaggtaaatataactatttattttacgattcgcaatctatacttcagaattaaaatcaattacatgaatcaggttaacaagatttgatgaaggagaagttcctgtatatcatgtccctggagtacctaacatatttatgcaagtcggccgtccaagtggtgaaatgcacgtagaatggcttacagagaaagactaccaaagcgcacatgcatatgttttaagaaattgtgactattttcaaccacttgagaggtattttaaatcactccttaatttaaatttttcattatgataactttgatttatttatcttcggttgtaaatatagtatgttcgaggattttctttctgtgaaatatccaactttgtccaaaaaagaactctacgcgaaaagagctgaaggatattatcaatgggttaaagaatatgtaagtctacatcattttagtaatttttaaaagtgatcattaaaattatgttgatattgatattgtttatttattatgtaggtaacatattggaaccctacttctccatttcctacttgggttcaagagatcgtgcatgggcctttgaacaaggttaaaacttggccaatgtatttcacacgaggatatttgtttcatacgaaaaatcatggcgctggacgaaaaacatgtaactatggggtatgtgttaaggagaaaattacgtggattcatctgatgaagcggatttctacggtaccttaactgatatcatagaactcgagtatgaggggatcgtcaatttgaaaatcacactttttaagtgtaagtggtatgacccaaaggttggtagaggcactcggtgaagccatggtggtggtgtagacgttctatcatctaggaaatacaataaatacgagccatttattctaggtacgtaattaagaatacataaggcgacaattgtctttattgttgggctttcttattttgcggcccaaacccaagaaatatagtgactaaaatacgactacattgcgactacgtgtataaagaaaaccctaattcgatcaattcccttctcatttcatccaaagttaacctcttcttcttcttcaacttcttcttcgtcttcaacttcaacttcttcttcttcttcttcaagatcttctctttcttcaagttcttcgatctctatctatcttctaattcgatctatctccttctaattcgatctatcctcttcttctaattcgatctatcttcaacttgaagatcttctctttcttcttcttcttctttcaaccatgcctatcgccggtcgtggaggttcacgaaagaggaagatgacccccaacgttacacagagagccggagggtccacaccggttggaagaccagcatcgctgcctcagcagtacgacttcactccagcggcacctcaagctcctctgacgcatccgcctcaagccgctggagcctcaacgtcatctccccactaccgcaactgtccgccgccgcaacaactattccagagctccaccactcagcgtgttgatccgctgccgccgcgatctgaagaggcgcagtttaatccaccgccagaagatcctctataccaagagcctccggagtctccaaatcccaactctcagggacacagccatccatcttctcagggcaacaactttcaagacggagctcctcaatcattgtcggagctacaagaagactcggcgagggctctctccgacatacttatggttcccgggagggaaatgtggaccaccgtattgtctcctattcccaagccgaagactgaatggtatgtgctcttcctcaacttattagcttgttttagattctgtattagtttgtgttaggttgcagcaatgatgaagcttgtgttaggttgagatcctctagcttgttgtcttgagtggcttgtcttaggttgcagcaatgattagcttgtgttaggttgtgtcttgattagcttgttgtcttgatctgcttgtgttagattgtggtggattgtgtcttgattagcttctgtaatactctgtcttgatgagcttgtgttagattttggtcgattgctattgtgtgaacataaagctcatgtcttgatgagcttgtgttctgttgtggtggcttactctcttgtgttctgttgtggcggtgtgttctgttgtggtggcttgctatcttatgttttgttgtggtggcttgctatcttgtgttctgttgtggtggcttactctcttgtgttctgttgtggcggtttgttctgttgtagtggcttgcttacttgtgttctgttgtggtggcttgttctgttgtggtcgcttgctatatcttctgagaacatagtggtcatgtctagcatacttgtgttctgttgtggtggtttgctctcttgtgttctgttgtggaggcttgctattctttatgttgagtagtttcactaatgaaacatgtttttatctttcattgtttcatgtctttggaggtttactcgcgacaggggatcaaagttggttagaaagataactcggatttttacacaaaaatttaatgctccatactataactggtcatgtgtaccagtggataaaagagagaggttatttcttgagtttgcggtaagctgtcatgcatctctcttactttcttaactttcgagcttaatcttttgaatttcactaactcaagctacaattttttgtagaaaactcacagttgggatcccttaataacagggactgtgtagtattacttcaatgaggtctgtaaacggcgcttgaaagacatggttagcaccgcaaggagaactagggagcagcctccatggattggtgaaactctgtgggctgttatgtgcgcttactgggacaccgaaccagcacaaaaacggagtcggacctattccaaagctcgtctctctgaccgtaacggtctcggtcctcacatccacttctctgggccaaagtcttttcaggaaatccaagacgaattggtaagtttttctcttacctctttcagttacctcacatgtaagtttttgagtatttgagctgtgttggtttcactgcaggaggagaaattgggaagaatagtcactattggtgaggtgtttgtcgagactcatactaagtcggatggtacgtatgttgatcggaaggcggagttgattgctcaaacttatgagcagaatgtgagagatagattgtcacagctagaggcagaagcttctgttgtgtctgatggcacttcacgtcctcgggagctgacaaatgaggagttgacaaccatctttctccaggtaaaatgttgcagtctaaacctgttgactttgagtttttggttattcattcactaatctcttctttatttcttttcagtccaccgaaagggattccagaggcaatccttatggacttggcagtctcgaagacacattaggctgtgccaactacaatctgcctggacaatcatcatcgtccttcctagatttagaagaacggctgaaggaagcgcaacgcaagattgaggagcaggcagcctacaatgagaagcgtgattctgagattgctgcgcgtgaagctgagactgcccgaatcacggctgagcaaaaggacaaactcgaacacttgtccttagtggagaagtatctccgacaaacagatccgcaattccttgacttcatggcctctaaatcttcgacaaccacagagtctctaccagctactccacagaatgatcaataggtttagatttcagtcccttttcacttgaactttgaacaataatgtttgtgtgtgtgtttagtactttgaaccttaagtgtaagttgtgttttatgtatttgataggattttcaataaaaatgtgttttagttatactttatagcatttagaacaacaaacaaaccgaattctcataattaataaacaaccaacaaagaaatcaagatatgaccaaattcttatttcgacacaaaatgtcgtcgccaaatagtcgtccaatagtcgctatatagtcgtaccatagtcgtaccatagtcaccaatattaacgactatcgtctgacaatataagagagtcgttaggtagtcgtaaagacgtcgtacattagtcgtatattatttagtgactaagatacgacaaccagaatagtgcccacagtttaatacaaatgatcgtaatctagtcgcaaagtagtcgtcaatcgaagtacgactagtttacgactacacgaataatcccccataaacaggtaaattaatcgtacttaagtcgctatatagtcgccaaatattacgaccaatagacgactattccgtgccgactgtttcgtagtcgtatgttagtcgtaaagttacgactaacttacgactatgttgcttagcgactatgtatatacgactactcttgttagtcgtctattagtcgtattatttctgtttacgactatgaaacgactagtgttgtagtcggtaaacgcctgttttcttgtagtgcatgtaacccactcgtgtactagtcatgttacagttttgccttattgtacgtacataaagaacaattactgacctagtgtatggttttgatttcgaaggagataggagggaactcggagattgatgaagattcttccaagttacaccaaaatgtctctaactctctaatggaagacaatgtcgatcgtgttccatcaccaactcaccaggtaacctgtgttcttagtatttcattattgtacgtacagaatattttatgttctttatgttcttaattttgacataacagcccgaacaaggcattcttgatggtggtaactttgaagaactccttccgcagttaaaacaaatactgtctgacccaggcattgacaaaatgtcagatgatgtatcttccttgtcccatcaggtacgtcgggtactactaattatagtgtacgtacatgttatttctaatttgtatggtttgctatcttataggacgttgcgaaaggtgttggtggtaatcgtgaagaagaagttgttgctcctgagtcacaacagttggaggagtacagaatcgaactgccacaatcaccggaagacaaggttagacaagaagttgcttttgaacgtatagaagatggcaaacctaatgtacgtacaatgtttttgaaatccgtttcgctcctttgattgctttgctgtgagtgagactaatagatggacatccatctccatataatgaggtcaggatgaaacaattggtggggatggagaggaagtgttgaaggaggctaaaactccaagagttgtagatgaagccgtggaggtatgtgatactattatgctatttgtaacgcttatttgtcaaatagagaaataaccaaatctttggttactaaatctgaaggacaccacattacctggacttgttcctccgaggtttgtagaggcttttgatgatgaagcgaatctcagtgacccgtcttcaccaacagtagttgttagcaaggtaagttattaattaagacctagagcattactgtcggagttatcatttgatgtatgttaaattgttttcattaggttcttactgaattgaaaacatccagcgtcgttgatgtgagacatgctacttctcttctaccttacattgttcaacattactttcaactaactttcagcttatgtcgactatttattttgtacaactgccacaaaaagacgatgttctcgaagaaaatgtatctcaaattcttgagaaggttgtcgtccccgtagaggtcagtatatattatcccgtgtacctattaatatttccactgtacgtgcatatagtgtacgtactcttgtagttgtttccatgactaatctaattctattattttatgcttacagacagtaaagaaagacgaagttgtcgaagggggtgtttctcaaactgaagcaatcgttgctcccgggaatgagaatgagaagaaaaatgtaagacggagagttaccttctctgatgacacaaaaactgatgatacaaagagtgatgatgtaatatttgttgaggagagacaggcaggccctgaggtgttggtgaaggctggcgatttaccctacaatcctttggagaagattgacggagctaaattccagaagttatgcaatatcatggaaggagaacaaaggtatgcatctgtgcattcactccattatctgtttgtttgtcaatcatatatcaatcataactatttcatatgtcttactaaatttcagatgccatactctttttggctttcggaaaagggccaacgaattcttcacaactctagccgaggctaataattggtttggctcttacgtaagtgaccattgattacgtacactgttttaagtgtacgtatatttaagaatatgttttggaaagtacgtacataacatcatacttttattaactttccagcacatggaaatgatcgcactcttgatgtggcataagaacggggagcatatgaagagaaatcggtatgtcgtggtggatcccagactcttgatgtggcataaaaacggggagcatatgaagagaaatcggtatgtcgacgttatatatgttctcatgaacttgaaagatgagaagcattgggttgggttggctatatgcctgtaacgtcgctctattgaaatcaaggatcctttgatttcacttacgcgggagtctgtggttaggtcacgtatccttccaatactggagatgttgtcgtacctagtcagagcgacatgcaaagattatctcgaaaagccttatcccgtaactccttttacttacataaggaatcaacgtcttgcatagaatccaactaccagagattgcagtccgtacgcgatgaagtttattgagttgtacatgctgaactgtcctacgaaggacttgttttcgattgaagagctgatatgtacaacaaccgttagggttacgcaatcgacctctacgaccatggaattggttccttaaccttatttttaaatgctgggaaaacaaacttattttgtatgccttttggaacttgaatttggtagtgtttagattgacttgtttgttttcaaaacaatttattacttttggatgataagcaacatttttaataggaattaacaacgtacacaacgtaatatcttagcaatgtacgtacagactatgagtccacctgtacacagtgcacgactgcagtaacggtaacattgatttgacaaccatcaatgtaaaattaaattgctcattgaatgtaactgtaatttctccaacaatatctacatccgtggttattaatgggaggaagaatttgacctcttcggactatctcatttctaacatggtcaacccgactatttccgacgacttactcgctaagatatctaagaaagtggtagacaaatgctggttggaccttaagccactgctacgatcaggcactcgcggaagagacattgtctaccgtccggatatccataagcttgtgcttgtgtggtgttcccgatcacttccaagtaggaggtggccataatccaatcggaccccaaggagaaggccgcaatcgaccatttttcaaaaggtgccttctcgctaacaatccgacggttgtgtataacgaagcaatacgtgttctaatccatgaaagtgacatcaatggagcatttaagctcatgcagcgtcatgcactcatgcacccgtgcgagcagatgcaaccatcgcctgcgccatcatattcatatgtgcgggatatgattatatgggtggattgtttcttcagctctacacacgcaaccatcatccattggagtcggatatcacttgagatttgtgtgaggagttcctcgaggagataaagaagtttagccctccgtacaataatacttacggttattctttctgttatccaaacagccatggaattaagatgccaccatgcgcctaccattgttacatggtttctagtgcattcaagaacgtttgcaacaaatgtcacctatggtcgtgtgctaggcgagttagctaaatgctctaggtctcgcatttgtacgtgtgctaggtgtacacggtcacttgtttcaagtttgttaggtgtttggtcctatgtattttgtttatgtttcattgttatttcctattatgttgtttcttccgtttctttgaaattccctatttacaacttgtgtttttgtttcatgcggtttggttctatcggtcatgaataatatatttttgttgtcaaactaaacttacggttgtacttacattctaacaagtacttacattctaactataaatgtaataataaatgtaagcatctatgtcagtcaatagacgcataatgtcagtcttattaaagacgtgccaagcgttaattaataaatacacttccacttgtcataatttctagaacctctatgcttatagtaaatatacgtacacgtgtaacgccttattagacgtacatttatcaattatttaagataaattagcatcggtttgcaccgaaaatatgagaattaaatatgtacgtacactgttactttctacgtacatttattgatatagtagataaacgttagccttctcaaataatcacttatcctctgatttgacatccaacttaaataacattcaatgcaaccgtaatctccccaaccgactctctttccttggttattaaaaggacaatgatttgaccatattggcctatctcattcctaacatgatgaatccgactattcccgacgatttactcgcaaagatagctaagaaaatggctgacaaatgctggtgggaccttcagccactactacggtcaggcacacgtggcagagatattgtataccgtctggatgtcctgaaaggtgctaatatttttagcaagtgcgacgatcccgacgactaccaagttgatggcagccatcatccatccgccccccagggagaaggccgacatcgagcctttttcaaaaggtgtgtggatgctggcaatccgactgccatgtattttgaagctctgcgtgttctaacgcatgaacgggacattaagggagccatcaacctcttacgacctcatgtttcatcacaagcccatgcaacacttgcttgtgcgatacttttcataattgacggtaatgattacatgggcgccatgtttctaaacctattcggacgcaatcattatccgttggggacaaaagtgatacgggatttgtgtgaggagttcctggaggatttaaagaagtttcgccctccatataataatacttatggatcgacgttctcttatcctaacagccatggtattcaaactccagattgcgccctgctttgttacattgtctctggaccgttcaagaacgtgtgtaacagttgttacgtctggtggtgtgctaggcgagttagccaaatgctctagtaatataaatctactagttatttgaagttgttatttaatgttatcgtctaagttatgtttcaagttcttctaatgccgttatgaagttatgtttctaattcgtttatcctctatgcatgaagttgttcaagttcttgtaatgcttctatgaagttatgtttgaatttgtgcttatcctctggtttacaaagtttctccgtttaatggtttattcggatatgagtaataaatttgaagtttcgtaatccatacttatttctgtacttacattataactttaaagttactataaatgtaggaataaatatgactggactgacgcaaaagacaatattgtgatagacgtgacatggcataataaatacactccaattcggcgtataggtttatatagacgtacacgtgttactaatgacgtacatgtaactaataagtcgacgagatagcttgggtttacatcaaaaactgcaaatttcaatatagacgtacacgtgtaaatctacacgtacataaaccaatatactcgaaaattgtaatttgaagtttcagttttaatcggaaatagttaatagtttattcttttcatataaacacgagttaatgtccaatattaataccacctacaataggtaagtgggacgtcaaatatttacttagttgtctcctcgccattaggtctatataacatgtacactgggacaagtcatctccacacttttcattactcttactatgacaaatataacctaaactcaccaaaaaaatccctcagactcggcaatggacgtccccacacccccaccagcggaaatttacatggccattcagctacctaacccactcagcatcctcgtcaactacttacccgtttctgtaactcccattgaaacgctcagaggtcccgtaagcacgctgaagccgactgctatcaacatggatgattttatgacgtggcctgatttcgtgttgccgaaaacacctttccgaccatatttcaccctcctccttgaacggggagcaatgccggcgctttaccttgaaggggttcgtttagcttgcaatttcgttacggttgctcatggtttaaccatgttgggttctatctctcccatcgacgcctacgcatgtttctatcatggactgttcctaaccgcaactagcaacggacgagaggttgaagccgtgaatgcgactttttgggatttagtgccatcattcgaagctacaaacacaatgggggagttggttatgtatcacataagtcgactgcatgctgaaggacctcggatgtggaatcgatcatggaggttcgtggtttcaccagatgtttgggtcgttgcagctacggagcctgctgccgcaattgtttcttctactggtatgctagggagttgtgcatattttattaaggaaaggcgttggttcagcatctgatttcccattctatgcatcggctataatttcgactttttgtaaagcatacgttttcctgttatatgcttcggctttactatcctttggttgtatgctctaatcggtttattgttatgctttgtagttcctgctttttttgttatgttttgtagttccatgttgtattgtttatgttatgaatggaactaagtttgtttacattgtacatagagtacaactatttgaacgtacaccgatataaatgtacgtccatggaaagtcattacaattatgatgtattttgtaataagtaaactgtagcagtttgaacgtacaccgatataaatgtacgtccatgaaaagtcattacaattatgatgtattttgtaataagtaaactgtagcagtttgaacgtacactgatacaatatacgtccataaaatatgatgtcggaaataaagtaaaactttagcataaatataggatatgtttaaattcggttacaaatctgtagttattaagaataacagagacaagagataaactaatagaataacagagactctgatttcttccacttccgatatatccggattagcaatgactttggagatggggtcattgctcagagtcttcagtttataaatcccgctcagacgccaggatacgagagcaataacattttgaggaccatttagccgctggaagaatctttgaaattccaaagcttgatcattgtgtgcttcacattgaagaacttctttgctacagagaatatatattatacggaggatataacaaacatataggtgaaaacttttttaaaaaataacacagaggcacttactattgatccattatcttaaaaggaagcttcagcccacggtagtcttcggtcaagttgccaacttcaaggagcgcaccaatcacatctggtgtacgtaataaaagataaaagtattacgtgtacgtacagatttacaagaatcaatagcgagtcaaatatactaaccaactaacactccagtagaaactgtcttctcgacgatgtagtcaaaaggaataaaatcataatacggtattgcagccaatcccaaaactttggtaacaatggtctgatccataaaacagatccggtagtcatgggacgttgtgtgtatcccctcgtcgtggagacgaaccgagaaagtattgataattatccactcattttctcggatacagtcagagtaaaacgaagcaatgcgacgattaatggtagcctctatgcgggaacgcattccctgcacgaaattatgatgattagtgacaattaaggtatgtggaagtaaaaacgttataaacacattggcgaaatagtactcgattatcggccaagatgagacccaggtcaaactcatttattcccacgcatttcttaaacaccctgaccacaaaagcgcgtatactccatccggtgatcattggaaaaagttcaaaaatggaatgatattcagcatccatgatgccaaaaaaaaaccagaataaccgactttctgtcttatttgtgagatgggtttggacttttgtttgaatggatgaagggtgttattaccaggttcttaaatagattttgaatagacgcgatgattggtcccaaatcgatgtaacggtttagttaaaaatgtaaccgtcaactctttataattagatgtacgaagtgtacgtacaaatgaatttttttatcaaaggtacgtacagacaacaacggtactgacaaaaagttgaaggataagcaaatacaccgataatacgaggtccacaaatgtacgtacagaagataacgtacagaaaaaataatatgtaatattacaacatagactgataaaaagatttccaaaacgtacgtagaacatcgtccaaaagcatagagactctaaccatcgcgagtaaaacagtcatcgactaaatagggtttttgcatgtcttcttgttatgaccggttttccgacatcttgtacactgattaggaatgagtcttttctgcctctttttctgaaagttataaaatagtatgtcttttaaaaggaagtaaaaatttcatagcagttaggatgggtgaaaaacttacccggttttccctagtagattgtatccttttggtgggtggtctcccaggtggtcgtctactgcgtggaggtatgagaatcaggtccgataaatcttgaggaataacaacgtcatttgggtccgctataggtaaaacgggttcttggaaagaatcagaaaacacttgaaggctataccacaatccaaccacagccttcagtttgacgccaaaatttattgcagcagctagagcatgctcgcatgggactcttaacatcgtgtacctaagacaagtacacgtacactcatctagtacaacgtgaaaatgctcaccactctttaaagtaacttgataactccatggcccagacatcatgactgcgaactttcctgacgcaggcaagtcttggaggaaacgttcatctacatccggggtcaccaaagagttacacttcgacacttttttccgccttgctgcaaaccatcgcataatgacctatcggatgaactctagcatatagacaattggatacacttttgccttccttaagacattgttcattgcctcggagttgttgctagtcatgatattgtaccgctcccctatgtagtatgcccttgtccaatgctcaaatccaacatcctctaaatactttgcgcatccgggactccgacctctcatctcttcaaagtatttttcaaaatctctaacccgatatgctttagcggcgctaaagaataaaccagacacaccgtacctagagtaagacactgatatgttttgctccaggtgtactatacatgctccatgatgggctttcgggtacaccacactgacgcctttatatatggaagaatgcctgtccgagacaatcatcaaatcgtcagtatctggaacaatctctgataatttctcaacgaaccaaatccatgaagcatcggtctcgccgtcaacaaccccaaaagctaatggaaagatatgtaagttcctgtcttgtgcacatgctataaggaggcatcctttgtaacgaccgactagctgcgttctgtctacaacaacgactttcctcatatatttccaaccttttatagaagccgagagagaaacgaatacatatttgaagcgctgccgaccattagattcaggagtggagtggagatgacagattgtaccgggatttgctaattgtagaagatacagatatgtaggtaaaaaccagtaactagccatatcatcaccccttatagagtttactgcaacctctctagctctccatgctgtagaatatgagatccgaacattaagatcatttaagaccaattgaagcaaatctacagctctcggacccccttgcgtagaactatatctattcttcataacctcgcctaaaagcttgtaagtagcatgtttacgataatcctttcgactctcgatcttgcaaacatggatagaatcatactctgtgattttgaaacatttggaactgggtatgacatgtgcagtttaatgccatgaacaattgcgatctacgcaaaccatttctaatattttagggcatgaccgagtttgtttgtagcggaagcaccttttgattgcaacaagtcgcacagtctgctgtatgacttgcttgtttttgaaaacacttcccacatacaacggatgacctgacgtactcaattcaacttctatctcatcaattctgctgggggttccacgatttgttgagtgtcattcacgatgtcctcctcaacatgaccaattccatattcttccacaatcagatcaccccatttattgtaatcgtaatcttcgccactaccttcactaccgtctattgtagggtcgagggtacttccacgacattcactatcagtgtcatcgtcatgtacatccatatcttcgtcctcttcattttcctcgtcctcatattcatccctatcaccttcatttatgtcatcctcatctacatttatatcttcgtaaaacttatgagctgcatcaatatttgtaacctctgtctctgtatggcctcccttgctgatagagtaaaaagacacatacaagttaacagaaggatcgctactacgaatcaacataaatgtatccaggctgatttgattctcaatatatactcgagggcgattacttgctatcatatcagacatcttttcaggcatccagtaacttattatagggttccattcactaaacttgaaactgaaaacatcacatattgtacttgccaaatccgtgtacgtcgttgtgtctgtaatacgtacacagcgtccgaaacttcctttctcagcttcaaatttccaaccttcttctttgtatatccactcaccaaccataattaatacatgtaacttcatacctgcaacataaattcctcagatcagaacaacattaaatacaaaaaatcagatctttttgaaggctttcatttatatcaacgaaggcaaaaagaatctctaacaaaacaatttatgaacttagaaatttaacaaaacagatcaaagggctttcatttatatctacaaagacaaaaagaatctccaacaaaacaatttctgaacttagaaatttttaaaaacggatcgttactttcatatcacgttctcaggtgtaattcataagaataacacatatttcttacctagatcacagattgtctccccttcaaaccttcaaactttgtaatacagcaactgaaaacttcagattcttcaccgtgacacaatttggattcgttttttttgcccaaaattctaatctcaattaaaagatttcccaaagacaacctaatgtaaaagatttcccaaagactccagtttcttagaaataagaggagttcaatattattagtttttgaaaatatattaataccaaagacaataaattcgtatgtgtaacgtaaaacatctaaatcacaagacccttaatctatcgacgatataaccactcattaactaaaaaaaacaatgtggaaaatttaatattggttatacttaaaacttatactaaacaaaacaaaagaacacgaaaagaattcgtctcactattacaagctttttactacatcattacactaaagacaacaatctcataagaaaaccaaataaaaccacaaactgatgatacgaaataaagaaatcaagtaaaaaaacaattaaaaatcatgaagcgagaacctttaggtaagagaaaaggctacttacaaacttcaactcaggcagctaaaaagaaaagaaaaaaagagactcatgaagaaccacaatgcaccaatcaaagacaaagtaaggttaccatctctcaataatagtatcaaataatgcatttacgatcacttctttaaaaaataaacaaacaaacttactttattcctatacaaattctccatttcagagtacaatttacatgtcaaacatcagtgtacgccgaggaaaaccaaaccactataaactaagttttctggatacatatataaataaaatatataaaaaaaaaaaaaaacaattttgggtattcaagttaatacgtcggcaaataatagtaaactacatttaacaaatgaaacaatactaatattatatatttgtagaggaacaaagaaaaacctgacaaatgctccatgcaatactattggcgaaaagagctactggaaagcttaaaggtacattggttataaacgatctttcaatacaccaaatgatttactaccaagtctaataatatttttataaatattaaaattcgacagcagtccataaaaactaacaaatatgttacaaatgctaaacaaattttagatcacttcttctcaaacaactcttaaattaaatcacagaaaaaggaaatcaaaagacatctaaatcatctgcaagtaaaacaaaagatgataatggatggctatatactacaagaaaacattgtatttttcgacaaaatttcctaccaaatttttgtaagacaaaacacttaccaaaatccttccaatttcctaccaaatttatattccgtcaaaaatattcgtcagtttttcgaaggaaatttctattcaatttcctacgacttatgaaatcgtaggaaatctcgtaggaaaatagaaggaaaacgaaaggaaatatagtggtaggaaaatagtcggaaacatttttgtccaatttcgtacaaaactatttttaaaagagactcaaaggaaaagcgtaggaactgttccttccagttgtaacaccccggtttcaggaatatggtggtgcattcagagagatttaaaataattgatttggtcatctatgtcaccaaagtgcacttatcttttcggtcaaaggtcctgagagaactccagagttaagcgtgcttgggttggagttgtctcaggatgggtgactttccgggaagtgattgtcgaacgatacgagtgaggacaaagcatggggaaagatcgtgtggtgaattgtagggtcggtaacaagtctttaaagcctcccgaacatggcgccccgactgtcggacaggagtgggcccatggggaagagagaggacgtggggcccactagtaggggcgattggggcgttacaaatggtatcagagccgaacccagatgagtgtggaataaagaaggcaagcaccatcgggggttacgatctttttgtgcaacgaggacgttgccatctgttagtgtgggtgaattgtaacacccagttttaggaatatggtggtgcatgcggagaggtttaaaagaatttatttggccaactatgtcaccaaagtgcacttatctttttggtcaaagatcctaagagaactccacagttaagtgtgcttgagctggaatagtttcaggatgggtgaccttccgagaagtgattttcggaaccatgcgagtgaggacaaagcatgggaaaagatcatgtgatgatttgtagagtcggtaacaagtctttaaagcctctcagacgtggcgcaccaaccgtcggacaggggtgggcccatgggcccgagagaggacgtggggcccactggtaggggcggttggggcgttacatcagtttccttcgaaaataactttctaagagaaccgaaggaataacgtaagagcctttcctaccaaaagtttcgtaggaaaatcgttggttttttaaaaatgtgataaacgaatttttgacaactaggtggaggaaatatataattaggtaaaaaaaaacatttttcatttaagtaggtggaatagtatttattttggtaggaaaactaaaagaaaaaaaaaatcttatataaaactatttcacagtccacttaacatcttcaaaaaaaacctcactccccaaaaatacaaaatcattcactcctacagttcccaaaaaatgtagaaacattcccttctacaataccaaaatattatatattctcaccaaaaaatatctcgatatatatatatatatatacgctacaagaataaagccgatttactagggatgaattagccgctaatccctcgcaattgggtagaagcaaggcaattgcgaggacaacgagttccttccaaattgctcctcgcaaatggtaaaaatcttgcaattttgagagggaaattatttctagcaaaaccacacgcactttacgagggaaataaatggtagcaaaatttttccaattgtttgatctagtacttcgagggaaagttacggtagaaaacaccttgcattttactttcttgtacttgcctcacaaaatttgcgaggaatttgcgatactgtttttatctccttgcaaatccctagcagaatttgcgatggatttgccagtattcggcaacgtctttcttttctattatggcttgatttgtgttgaactagactctaattatcttattctaattaattacttattaattagacctaaattaacaaattaatttgatatttagcttaatatgatttctgcttctcaaattaactcacatttgaaaactgaaatttcataagtaaatttaaaatgtatactagaattgtattgtttgaaaacctaaacatttgagaattgtattgttttgtgatagaaataacaagaaaaaaaaacattggttttaaaatgttgctgatgtagaggatcctcgtgcggtgttagctagggtcgcagcagttgtcgtctcgttgtagagttgcggtactggagcagtaaccacatgtgcttcatttgcgctgaccttttatgtctctgtcgaggaactacctcaaagaattgcagctaaagctggatccttgtcggtaagataatcaaacaggatatcgaagctgttgatcttcttagcctgagtttgaatgcaagctttagcggcagccagcttttaagaaagtagaaccggatcatcacgtggaagcagtggacctgcaattgctgaggatgcttcaaactgcagagaccaaccccataaatccttcctttctttcgcggagcaccctacaaagatcacaaaaactcacaagcacacaacacaaaaaccatgagaaaacagatacaaaacaaaaagaaaaaatcagacacaacacaacacaacacaaagtaattcagacacaacacaacacaacaatagaaccaatagaaagacaaagctaatcagacacaagtacataacataaagcgtttgagacaacagacaaaagatatagcaattcagatacaacactacacaaactaattcagacacaacataacaacaaaaccaatagaatgacaaagctaatcagacacaagtacaacacaaagcgcatgagtaaacagacaaaagacagcaattaagacacaacacaacacaaagtataatgaattagctgccaagatgacgagaaacttataccaaaaactaaagacacaacacaaacatttcagacaccatacacaacacacggactaaggactaaagatacaatgatatcttataagccaacaagcacaatactgaatggtaagagaaaatttacctcagtaaatatcttgttcttggcatgaacagaaaatccacctgatccagtgctctccatattgtccccttaacacatgtgagactcttcctcttctatcctagatgtcactttcttgtagatctcctctgactttccatcgatgacagttccatccgcttttctgtgtgtctcatctaataggacaaggaaatcaggagttgtttctccggtcttctcacactgaaacacaaacatataaagaagttgtcaatataacattgtagattaaataatggtaaggagagaagaatacttatcttacatgttttcgtgcacgagctttctatgaggtctggccggaatggtgtttatatatgccaaggccatctggatcatgatatctgactttggatcttgccaaaaccgaactaaaccagcccacacattaggatcaatctattttggcttggcatcatcacccttgtccttccactttcccttccattgtgacacttgatcagtcatcctatcctttagctttgcttcaaactcaatccttactctttcagtcttttgttaattaaacggtcccagttatatacttgctacaaaatagacagagcacatatcagaaatgaaaccaaacaacaaaacaagcagaaacatcaaaagagcacataacttactacaaacgtttcataccatcaatcgatcacaacatttgctgtatgtgaccaattggcatgaggttctttgaaatctctttcgaagatgcgacggactgttgctgcaactgcagggtcctggtcaaacctacaacacgagcaatcaaacgttctataaacctacatgaaatttatatttctttaaacttccaaggtactataatgctaaatccattttacaagttgttctataaatctatgaatttaaccttaccaaaaagttctcggaggacagtttgggtctagtcttgtcaagccagcacgaccgagactatcaagcagctcctccaatgtcaggttgttgagttgcttaggtggaggagcagaatgattgacagaaggctgagtggttggcgttggaggcgatggtggatggtgtgaaccctgaactcctaagatattcccatcattgaaaggagcattgacatgcaacggttcacgctgttgttgccctaaaccgtgcatgagtattctccgacgtgggcatcttgcacaaaaaaaacattgaattagatcgattatgtagaagaagttagatcgggaaaaaataagttagattggagaagaagaagaagttatattggagaagaagaagttagattggagaagaagaagttacatttgaggagtttcagatcgaaacaaaaatagagaagagtcgcggcggctgctgctggagaagaagagtcgcggcggctgctgctggagaagaagagtcgcggcggagaagataaatcggagaagaagagtcgcgacagagaagattgatcgcagaagaagaagaagttagatcgagaagaagaagttagattgtagaagaataacttagatcggagaagaagacgttacctttgaggtgtttcaaatcgagttgcggtgggtgctggagaagaagagttgcgaccgagaagaatacatatcggacaagaagaagagaggcagcgacgaagaaatcagatcgaagaaggaagagagatttgttgcagaagaagagaggcgtagaagaagaagagaatcagagattagggttaggattttctgagatgcggctggtttgagcaaaatcccataaaaagtgctttcgccttctagaatttcctcgcaaatttgcgagagattggtgaggtatgctactcgtctcccaaatgaatcgcaactccgtcgcaattgccacgcaaatttctctcgcaaatcggctgtattcttgtaatatatttatttatttattatccgagcaaaaatatgcatcgttttcggccatggatggataaggagcgatttgcttctaactcattgttgacgacagagtatgcggccgacctcatggaattcatgaccttagcaacaaatcaggcgtgttgcttagaaagtggtatgatgttttgtctttgtcgagtatgtaatataattcatttattgataaggctatagtgtggtcccacttagataaagatggaatattgccgagttacaaggtctggtataatcacggggaaagtgatacataccaagtgggtagtagtagtagaaatgttccaaatagggatgaagaatctacaatctcagaagaggcggtagacacagttcaaatggttcaagacgcatatagagaaaatatacagtggtttacagatatagaaagtggaggaaatgaaccaaactctgaagcaaaaaaattttacaaattattattgtcacaactttggttgttcgttggtgctcacatgccatctggtttgattatgtcttctctaaaggttccatttttacgttagattttggagaagcttcaagtgtcctttttgctatgaggtttgaggactgcttcacataaggtatgctggtggttctcgtttatatttttgttatatctttttcatagtttttaatttttaattttttgtttttaatgtaatttttgtcccaaatctaaaactggtataagtacttaataagttaaaaaggaaagaaaatatcttgtcgttaaatgtgaatgtatcttacgccacatgtaattaataattaattatatgtttattttgagaaaaacggtttaaaaattgataggggatagtatgcagatgtgcatatttatctaactcaatactagtatttttgttttgatgaagtaatactcttttatttatgtgttttcaattttaactaagaaataaactttaaaatccagttaaatttttatatatatttttagtcagctctctatttgaagagttttatttgattttattgtattatcattttttgtttgataaactagatattgacccgcgttacaccgcatgttgattatttgcgttagtatttaaattattttgtcaattcaatatcatctatatttatataattaagttatattaatttatcaccttatttatatatagatttacttttaatgttatattagtatgtgtttggtttgattttgttttgttaagatctgctgtttattatacgaatcattatataaagcagtgtattttatggttcattatttcgtgtttattatatattttcttatttgttataaattacgtaaagtataataattaaaattattttaaatttaattttttatatgtaattgtagttatcctaaaattttttaatgtttttctctacatgaaatagttgtatatatgtttcaaattttataagattgttttgtttgatttaaatctatatatacatttttggtgagttttttgggttgaaaaatccttattcaatttcctatttatatgtttagtccctacaaattcaatcagataaaatattttctttatgacaatgaccaaacttttgatgaacaattaagatattgcactagtaacttgcttaaacatggaaattattaagtactacttaaatatattgcataatcactcccttaaatctctacgaaattaatgaatgcttatttcctaattagcaaaattcggaaatcaatcctaactaaccatatctagaatcctaattaatcttaactaaccatatttataattacttgattcgaaaaataattttagttttaaatgctaatgatatcttactaaaatttattcttctgttatcaattacaagaatattacaagaataaattcttttaatgctaaggaattacttgattcaaaaagaaatttagtttttaatgctaatgaaatcttacatttacgagattttacaaatggattaaacattaatcacttgccattatttctttccatcattatcgaccctatttactttgaaatataagaaaatatctcaacaattagattgtatctacactaactatatatgtatttctctttgctcaagtctcgaaaattagattgccaaagtctcgaaaattagttcctaataaggtaagatagttttcaattataattgaacgagtatatgtgaggatcttttaccagcacacaatcataaaactaaagcatatttcaagcatattcctactaaacaatttccgaaattatcatcttgacgataatttccaagatcttccaaacttgctcaccaagattttagctacttatcattttatctaaacactataaatactcttcattcacatcacctaagagcaccaaactcgactactgattgttctttgtaactcattcattaaaccctgattttctcatacctcttggagaagtcagattttgaatcgggggatcatcgattgattcaattttcaattgggtttgctaatcctttcgtcttattgagacatgctttattggttaccatcatctaagctttatcaatctacaaaggaaaagggatcgacgaagaaatttgatgtctatgttttgtatagttggagaagaagaatactttacgtttttagatttaaccaaaagaatatttattgtcttttattactattatctttttcatttatgttttctgtttttttgggagacatccatacatcaaacatagcttatacaatatacatatacagtaaaacctctataaattaataatgtcaggatttattaatttatcgataaattaataatttattaattaataaagagaatttttggttttcagatttttgaaagttttctatatgtaaaaaaagaagttttgttataattctattatttcaaattttcttttagttatagttccttatatttttatagtgtacataacgttttatgaaatttcatttgtaaataattttaaaatttcttttttcatttgatttccttattgtttttgtgtttgatgtagaagttcttatattaagagctacgtagcattagtttagttattatattatttattcttaattgactaagctacaaaaattttggttttcttctctgtctttgatccacaccaacgatggcgtctcatctcaaaggtgtttcgaaatcaacgatgacagatcatatacgtaaagaattatgtgagtacaagagatatcatatggaatgcactcaaaacgatttaaaagtatagcttgaagaaaagtttcatttaaagattagtcaaggtacaatctcaaacacactcaaacattctgctgagtatctttcaaccaacctaggaaaaggaaaagctatcaagcgacacaaatcagcaaaatttccagagatggaaaaggttgtttttgagtggttcctccaacaccaaagtcatgtgaatatgaccggagaactaatattagaaaaggcaaaagagacaatgaaacttgtataccctctacaagattccgtgaagcaattttctcaaggatggcttgaaaagtttaagttacgacatggtatcaagtcttttcgtcgttttggagagagtggttctgttgatacacatgacatggaaaagaagctggaagttatcagggaaaaaatagatcaatttccattgaaagatgtttttaatatggacgaaactggtttgttttacaagttacaagctgatcattctcttgctacgaaacaacttgaaggaagaaaacaagataaagaaaggttgacagttgttatttgctgcaatgcagatggctctgaaaaagttcctttgtggattattggaaaatatgcaaaaccacgttgttttaagaatgtcaacatgagtggcttgaattgtgagtatcggtccaacaaaagggcttggatgacaagtgtgatttttgaagaatatatgcgttggtttgataacaagatgcatggtagaagagttttgtttgtggtagataatggtccagcacatccaaaaattattgaagggttacaaaatgttgagttgttcttcttgccacctaacatgacgtcaaaaattcaaccttgtgatgctggaataataagagcttttaagatgcattaccgtaggagattttaccgtgagattttagaaggctatgagttgggacaatctgatccaggtacgatcaatgttttagatgctattagttttgcagtctcggcttggacaattaatgttcgacgagagacaatattaaattgttttcgacactgcaaaattcattctgattgatgatgttattaacaatctaggctatcgcaatagaatggatgtcaatagtctacttgattatcctggtgaaaatgatgcatgttcagaagttcagactttagaagaaattgatgcatctatctttaatggtgatgatgaagttgaagatgatattgcgctacctttagaaccaattacacgtaaggaagcaattatcacatctagaacacttcataacttttggatgcgatttgataagacaaccccagaaatttttaatgcagtaaggaagattagagatgaactccaaaaagaatgcaagttcaagaataagcaaacaacaatagagtcatatttcactaaattttcttaaatatatatatatatatatattttttttatagaattattaatttatgatattgataggactatattttacctagggttttcaaaaaagttattatcttattaatttatcgatttgtattgttttttacactagtcccaactcgggaccggaagaatttattaatttagagaggttattaatttatcgagtattaatttatagaggttctactgtatatacttctttgttttttattccctatagacttattgttttttaatccgattgtaaattttttcgacaaattgactataaagataacctttttttttggaaaccgtttttttttttttgtaaacgagctattaaagagaaccatacaacaaaatccttagatcatcttcatttgagtatctcaatgagatactcaacaaaaaaattaataattcaaaaaaaaagtatgagagagggagagttgagtttctcgaaggagaaactttgagaaactattctcatccaatttggacggttgtcataatacttagtttaactattaaataataattaatatatttgttttgattaaaatattagaaatctttttttttgagaaactttacttagttttaccgatggagatggtcttaatacatacacggtttacaaaactaattacagtccgatgatgctcatgcgactacaccgataaagaagaagggattataggtggttcattaatcattatacatctatacttcatttatttatttattttgattttttttggtaatctatactaatgttctccacttgcaaatttaaattccttggataattttaatatatacttaaataagaatctgtcttatgcacgggtaaattattttgacttcaacgtttcagtttgggtgtaatgtatcaatttttggctatttttaatgggagatttgcaaaactacccttttttactaccattttgcaataatacccttttgtgttgttcatttttaaaaatacctcttctcttgaacagaataactaaattaccctcatctaataggaacatgtaattggaaactgaaatatttccgccaaatttatttttccctccaaaaaaaagtttcccgccaaacttttttcccgccaaaaaaaaagtttcccgccaaaaaaaaatatttcccgccaaattattttatttcgttacaaattttttctcagtcaaaaaaatgcttttaaaaatccttgtaatttttttggcgggaaagtgatttacaagggattttaaaagggttttaaaagatttacaagggattttaaaagatttacaatggattttaaatttttttttttaaagattttcaaaggattttaaaagggtttttaaatatttacaaggtattttaaaagggttttaaaagatttacaaaggattttaaaagatttacaatggattttaaaaggcttttaaaatatttacaaaggattttaaaagggttttaaaagatttacaagagattttaaaaggttttaaatttacaaaagtttttaaagggtcttgttgtaaattctttaaaaatcttttaaaaatccttgtacatcttttaaaacccttttaaaatctcttgtaaatctttaaaacccttttaaaatcccttgtaaatcttttaaaacacttttaaaccctttcaaaatcttttaaaaacctttgtaaatattttaaaggcctttaaaattcctcgtaaatattttaaaactcttttaaaatctcttgtaaatcttttaaaacccttttaaaatctcttgaaaagctatttcccgccaaaaaaaaatttttgcgggaaaatatttttgaaaaaaaaaatttggcagaaaatttttttttcgaaactttttggctggaatttttttttttcgaaaatttatggcgggaaaattttggcgggaaatttattttagaatattttaggcaaaaaatattaatatttcattttcttaacctaaaacattttttaaataggggtaaaatagtcattaaaaatttaaagagggtagaaataaaaatgacaaataggaaagggtagaattgaaaaagggtagtgtgcaaagggcattctcagcaagaattgctaaggttcagttatattatttagtgagctttgtaaaaactatagcctacttcccactatattaattttatgcaatcaaattcaattaacaaaaataaaaaggtgttaaacgatggtttatcttcttcatgttttggttattttagatatttgatgtatgttttttttatgtaaagtggtttgcaaacgaagtttcttttgacaagtttggtgattttcaactatattttttttatatgtaaagtggtttgcaaaggaatcaatatttaatttgattcttaaaagttaaatatcaaaaaaaataaaacttttttaaaaaattatatatattaatacggaaaattatactacgtgtgaaatcttatatataaaatcaaaatacaattataattcgatattattattttttcaaatttataatatgaaaaaatgacaaaatgatgtttaatttcacgtgacggggttatatggtgggacgtgtttgagttgatattaatatgggatgatatatactatcggtgaaattctataattaacaatcaaaatataattatacaatttgaaaaactaaacagagtaacaatattcaaaaaatatatagataacttcaaattttaaattctttagttctaaaaattgtcccaaggtgtattatacattaaaaagaaataacatatgtctatatatcatcttaaagacagaattcatttttttatataaaaatatacacatgtggtatacctcttaatatgttttattttaatattatattaattagaataaaattgttaactttctcataaaaatatcaacccgcggtgtaccgtggggcaattctagtgtatggtatactgagagacgataattataagatttgaaattttaagttgtattaaatttattatttttaaatttttatagtgtttaagattgtataattgtatattgattgttaattctaggattttctcaataatatacgggaaaaatttggaaaaaaatctcaactaatttttatttggacgtttaatacctagttgtttttggttggaagaaaaatatacaaactaataaaactgtgcaatttaataacaaaaaaaataaatgttgttattttcatactaacgatctcacaacaaaaataaaattccaattttacccttacaatctcaattaactatcaattttacccttacaatgtttataatttttaaatttcttattaattattttaaagtttaaatatttataatatttaaaacttcaaaaaagttttttattgttaatattgttaaatttttattgtgtttaagactatataattgtatattgattgttaattataggatttcacccgtagtatatcatcttatattaatataacagctatcgtcaattctaggatttgagcagtcgtataaagtttaaatgtttataatgttaaagcttcttataaacaaattaagatgcgtttctaaaattttgaatttgaagttgtaattctttttgttactattgtttgttttgtttagtgtttaagattgtataattgtattttgattgttatttctactatttcatctgtagtataccgtcccgtattattatcacactacatagactagaaagaagcaatctacatatatgtcatgctattattatgtagaggaaggactgaagagggaaaaacctatatgagccaacttgaatgggctaaagacaccaccatggctgaaacttgttggaaaaaaatcaaaacctcactacatgggattagagtggcgagaaagagatgctatatgatatcatttcgtaacatgaaacccctagacgtgtgctatcccatagatttagacaacacatgtggaaaagttttttctacaaacaaatgtttatctttttttttttttttgaacaacaaaacccttttattgaatcaggcatccgtacaagagaatagagctgctttcgccacagcatcagcatgtcgattacactctctataaatggaattgaaagagcaaaatgagaaaagagcagagatagataggatattgtggagaatcccgtgaagttccttcaattggagcttcaagttaagagctttgataagtgtgagcgagtctgaagcgaaagatatgtggatgaaagctaattcatttgcaactcgaatcgcagtaagagttgccagtgcttcggccatgaggggagaaagaacaaaagagagcagagtcgagccttgtcggacgatgcaattttgccgatccttgaagagccaacctaagcacgctttattctcaggtttccaggaggcatcagtaaagcaggtaaccatattttcgggtgagggggcttggaggggtgggttggggagagctctgatcattggactagaagattgagcctactaccactcctttgcctggataattgctagaacaagtgcatcctttgctgagatttgtttcttactaaaaataaactgatttcgtgaagtccatatgatccaacaaatctatggaaagagaggaccattaccaatctcagacggaggaagacaagtaaggttcttagcacacatgataccttctttgatggacactagattgtttcggttcagactttctttgaatggagcttgattccagatctgtgtcacaaatggacaggtgaagctccgtttcagcaattccggaatgtgggaatttgatagagtctgtgactagacggtgggatagattttcgccaacggaagtgctctttgagccattttccatagcagaagttttgtttttggggaggtagctaaggacaaaatattagatttccaactgcaatggtcttgcggcaaagccactggggttgtaggtgaggtctcctcctcagagaaggattcatggtaccccaatttggtgctataagatccatcttttgtgggaagccaagcccatttattagccgcacatcttttactgggtttcagacttagaatatccttctcataggctggcagtaagcgttggatcagggctttattccaaacataagcatccgacaataacagattggaaacagtccaactatgtgattcaaaggtgggggtcccataggggcttgaggagaggtcagggagagccaaggacttctccagacgggaatagacgtaccagagtcaatgaggtaccccaacttgggttttaagaggtctctgccgaagcagatgctgcaccaaccatgagaagcagagttgggaactatgcaatcgagaaagttggatgaagtgcaatatttgcctagaaggaccttagccaacaagaaggaagggttattgagcagtctccagctaattttggctaagagagcagagttgaaggtttgaatatctctgaaccctaaccctccttctctaaaggactttgtcattgttttccaagatacccaatcttcttttcagtttttgtgtcccaccaaaatctagtaagtgctgactaaattctcttacatagattgtttggatcttgaaacaggacatggtgtaggatggcatagcggaaagaactgatttaagcatagtaagcttacccgcagtggaaaggaagcgtgaggaccagctcagagctcgttgcttaatccgaaccactatcattttgaaaagatcctttttctttttacaaaacaattcaggtaatccaagatacttccctttcccaccttctttttgaatattaagtactgcctgaacccgagtctttgtttcaggagctgttttagaggagaaagtaatagaggatttctctctattgacttgttatcctgaagcttggtcatacttgtggaggatttgtttcagcttggcgcagtttttgggatcagagcgggagaaaaacatcgtatcatccacaaacaacagatgattaatatgtgggctgcgtttggaaactcttaggccaattaagttaccttggctgagggcattgttacacagtccagacagcacttcactgcagataatgaagatgtatggtgataagggtctccctgcctgattcccctttcaggtgtgactagtcgtctagcctgaccattgaggaggaaagaataggtaacaaagttaatacactgcattagccattgaatcagacgagggtggaatcccattctttcaagagctgcctggataaagtcccattctagcctgtcataggctttgctcatgtcagttttcactaccatgaagcaacgttttattgctcctgaggttttaaagtaatggagagcttcatgggtgattaaaacgttatcagatatagcaagctggggaacaaaaggtgattgattttaagagatacacaaatgtaaaactggttgaagtctcttggctagaatctttgatatgatcttgtaataacagagcaaagagtgatgggtctgtagtctgaaaccttttgggggcaaggcacctttggtattaacctgacatgggtgtgattgattcttcttggcaggacatgtaataaagatagcttggacttcagagatgatttggtcgctgatattgtcctagttagattgaaaaaaactcgctgagaagccatcaggacccggggccttgtcaggatgaatagagaaacaaggagttggcattagtatgagtttgtcattcatatcttgggagatacttggttttagggttgtattgacaattgatttttttctccaggaattgaggtaaagatttgttggtaatattcagaaataacatttattatttcatcctcctcataaactggaaaactttgaattaggtactttgccagtgtacttcgaaaaagagtacttttgttgctgaaaattgacctttctacccttttgtacttttattgctagtcgttttaaatgaagttcaaatgtttattgctgggttttttttatcgcttgttgcagggtgttgatgttccagtgtttgccatagctggaaagtgggaatgttcacaacgtctaaaaagcctccagtagctttaagtagcactgtcgcgccgaaaagtttcttgcttgtaaaggagacaaaggcacatttaaatttttgccactctattgagcccagtgttggtggggacatccaaaaatttgattggcgtgagcttggggaaagttttggaactgccaaatacattccaagggagctggagagcgttcgtgttgagtctcaagtagttcagtttgttactgctccaacaacagagaccaatggtgacgtagatgatggcgcaggaaaatacttttcaagtgaggtggagggcgttcatgttgagttggcagtggttaagtctgttagtgccccaacaacagagacaaatggtgaagcagttgatggtgcagaggagtggcttgttcgaggaattaggcgtgacgacaaagctctgtggactgaacatgcgtctgatgtttgcaatgatttagatatggcgggattataagtctagctgatgcaggcacgccatctttgagtactcacattgatggaagatgcgaggaagatttctttgccaactactctgaggatgaggttgatcagagggagctagaggctttagaaagagctgaagcggaaaaggctcgtgttaaaggcattagtctccggtactgcctagtcccacggcttcttatccaacgaatctgatcttcaatgaggtttgcaatctcaagtgcttcagtgaaacttgataccttattgagaaagttatctagtaccaaaaagccttgatccatagaaccgcaacataggaggaagattgcaaaagcaaactgagcatggaattggttccttaaccttatttttaaatgctgggaaaacaaacttattttgtatgccttttggaacttgaatttggtagtgtttagattgacttgtttgttttcaaaacaatttattacttttggatgataagcaacatttttattaggaattaacaacgtacacaacgtaatatcttagcaatgtacgtacagactatgagtccacctgtacacagtgcacgactgcagtaacggtaacattgatttgacaaccatcaatgtaaaattaaattgctcattgaatgtaactgtaatttctccaacaatatctacatccgtggttattaatgggaggaacaatttgacctcttcggagtatctcatttctaacatggtcaacccgactatttccgacgacttactcgttaagatagctaaaaaagtggcagacaaatgctggttggaccttaagccactgctacgatcaggcactcgcggaagagacattgtctaccgtccggatatccttaaagacgctaacatcttcagcttgtgcggtgttcccgatcacttccaagtaggaggtggccataatccaaccggaccccaaggagaaagccgcaatcgaccatttttcaaaaggtgccttctcgctaacaatccgatggctgtgtataacgaagcaatacgtgttctaatccatgaaagtgacatcaatggagcatttaagctcatgcagcgtcatgcacccgtgcgagcagatgcaaccatcgcctgcgccatcatattcatatgtgcgggatatgattatatgggtggattgtttcttcagctctacacacgcaaccatcatccattggagtcggatatcacttgagatttgtgtgaggagttcctcgaggagataaagaagtttagccctccgtacaataatacttacggttattctttctgttatccgaacagccatggaattaagatgccaccatgcgcctaccattgttacatggtttctggtgcattcaagaacgtttgcaacaagtgtcacctatggtcgtgtgctaggcgagttagctaaatgctgtaggtatcgcatttgtacgtgtgctaggtgtacacggtcacttgtttcaagtttgttaggtgtttggacctatgtattttgtttatgtttcattgttatttcctattatgttgtttcttccgtttctttgaaatttcctatttacaacttgtgtttttgtttcatgcggtttggttctatcggtcatgaataatatatttgtgttgtcaaactaaacttacggttgtacttacattctaacaagtacttacattctaactataaatgtaataataaatgtaagcatatatgtcagtcaatagacgcataatgtcagtcttattaaagacgtgccaagcgttaattaataaatacacttccacttgtcataatttctagaacctctatgcttattgtaaatatacgtacacgtgtaacgccttattagacgtacatttatcaattatttaagataaagtagcatcggtttgcaccaaaaatatgagaattaaatatgtacgtagactgttactttatacgtacatttattgatatagtagataaatgttagtcttctcaaataatcacttatcctctgatttgacatccaacttaaataacattcaatgcaactgtaatctccccaaccgactctctttccttggttattaaaaggacaatgatttgaccatattggcctatctcattcctaacatggtgaatccgactattcccgacgatttactcgcaaagatagctaagaaaatgactgacaaatgctggtgggaccttcagccactactacggtcagacacacgtggcggagatattgtataccgtctggatgtcctgaaaggtgctaatatttttagcatgtgcgacgatcccgacgactaccaagttgatggcagccatcatccatccggcccccagggagaaggccgacatcgagcctttttcaaaaggtgtgtggatgctggcaatccgactgccacgtattttgaagctctgcgtgttctaacgcatgaacgtgacattaagggagccatcaacctcttacgacctcatgttccatcacaagcccatgcaacacttgcttgtgcgatacttttcataattgacggtaatgattacatgggcgccatgtttctaaacctattcgaacgcaatcattatccgttcaggacaaaagagatacgggatttgtgtgaggagttcctggaggatttaaagaagtttcgccctccatataataatacttatggatcgacgttctcttatcataacagccatggtattcaaactccagattgcgccctgctttgttacattgtctctggaccgttcaagaacgtgtgtaacagttgttacctctggtggtgtgctaggcgagttagccaaatgctctagtaatataaatctactagttatttgaagttgttatttaatgttatcgtctaagttatgtttcaagttcttctaatgccgttatgaagttatgtttctaattcgttttatcctctatgcatgaagttgttcaagttcttgtaatgcttttatgaagttatgtttgaatttgtgcttatcctctggtttacaaagtttctccgtttaatggtttattcggatatgagtaataaatttgaagtttcgtaatccatacttatttctgtacttacattataactttaaagtcactataaatgtaggaataaatatgactggattgacgcaaaagacagtattgtgatagacgtgacatggcataataaatacactccaattcagcgtataggtttatatagacgtacacgtgttactaatgacgtacatgtaactaataagtcgacgagatagcttgggtttacatcaaaaactacaaatttcaatatagaagtacacgtgtaaatctacacgtacataaaccaatatactcgaaaattgtaatttgaagtttcagttttaatcggaaatagttaatagtttattcttttcatataaacacgagttaatgtccaatattaataccacctacaataggtaagtgggacgtcaaatatttacttagttgtctcctcgccattaggtctatataacatgtacactgggacaagtcatctccacacttttcattactcttactatgacaaatataacctaaactcaccaaaaaaatccctcagactcggcaatggacgtccccacacccccaccggcggaaatttacatggccattcagctacctaacccactcagcatcctcgtcaactacttacccgtttctgtaactcccattgaaacgctcagaggtcccgtaagcacgctgaagccgaccgctatcaacatggatgagtttatgacgtggcctgatttcgtgttgccgaaaacacctttccgaccatattttaccctcctgcttgaacggggagcaatgtcggcgctttaccttgaaggggttcgtttagcttgcaatttcgttacggttgctcatggtttaaccatgttgggttctatctctcccaccgacgcctacgcatgtttctatcatggactgttcctaaccgcaactagcaacagacgagaggttgaagccgtgaatgcgactttctgggatttagtgccatcattcgaagctgcaaacacaatgggggagttggttatgtatcacataagttgactgcatgctgaaggacctcggatgtgggatcgatcatggaggttcgtggtttcaccagatgtttgggtcgttgcaactacggagcctgctgccggaattgtttcttctactggtatgctagggagttgtgcatattttattaaggaaaggcgttggttcagcatctgatttcccattctatgcatcggctataatttcgactttttgtaaagcatatgttttcctgttatatgcttcggctttactatcctttggttgtatgctctaatcggtttattgttatgctttgtagttcctgctcttttgttatgttttgtagttccatgttttattgtttatgttatgaatggaactaagtttgtttacattctacatagagtacaactatttaaacgtacaccgatataaatgtacgtccatggaaagtcattacaattatgatgtattttgtaataagtaaactgtagcagtttgaacgtacaccgatataaatgtacgtccatggaaagtcattacaattatgatgtattttgtaataagtaaactgtagcagtttgaacgtacactgatataatatacgtccatgaaatataatgtcggaaataaagtaaaactttagcataaatataggatatgtttaaattcggttacaaatctgtagttattaagaataacagagacaagagataaactaatagacaacgactctgatttcttccacttccggtatatccggattagcaatgactttggagatggggtcattgctcagagtcttcagtttataaatcccgctcagacgccaggatacgagagcaataacattttgaggaccagttagccgctggaagaatctttgaaattccaaagcttgatcattgtgtgcttcacattgaagaacttctttgctacagagaatatatattatacggaggatataacaaacatataggtgaaaacttttttaaaaaataacacagaggcacttactattgatccattatcttaaaaggaagctt

SEQ ID NO: 183 - DNA, 90859 bp, Arabidopsis thaliana
aagctttgatgcagctgtgacaatgccgtctgctgtggtttccatcatgtttagtgattcactctaggcaactctgatttttctggccgcactttcgtctggatcagggcaataaatatattgaatagtgacgtcctgcagctcagtcaagacctggtcccttatagggaggggtgcagaggggtcaatgggttcagggagaagaggccgctttgtaactcagtttcctctaaaggaggaggagtagggggatcagaacttggtaaatttctctctagaggtggtctcctcgctctggaagagtcagaagttgctgcctgaaaacccgttgaggagtttgatttttctctccattggagattttggtgagttgacagtcttggttccctcctggtgagttgaggtgaagcgatgtgagagcttcttgtaccttcattgtatcttcccgcatttaatctatgttcagtcctccctgacccagggaatctggtttctgagattgaatgagacctgtcatcccgaggagacgctttccttttattagagttggccacttggtgagggtggattctccgtccagagtgtgaggggagactttggggctacaaagttgtcagctggagtgtagtagtttcttgagttggactgtgacactggtagagaagcaacaggtaaagggttggatgttttggtgcttacaggggccgactgcactctaggacagtttttcttctcatgtgataatctttgacaatgtagacagtgattcttcagatttttgtagtctaagtagaccacagcttcacccccattagggaagtcaacaattgtctccttgattaggggttgcaggccgtctaggaggacttttattttgacagaagaagaggttatttcctttgtcataacttcaccaagttcctctcttatggcttgtagcattttcggcttccaaaaatgcttagggaggccttggagttcaatccagaaagagatcagagaggggaatgagggtgagataattggttcccatttctgcaaaatcaccatccattggtcaaaatggtatggtctgttatcaacgacctgttggagatcctcacggaagtcgaacttgagttgaaagactccttgtcctagatctgatccaatggctttacctttaagagtccaaggattagagagaaacaagaataaagcccaaagtctttgtccagattggttggttaagcgccctattagggttagagcattctcctcaacaagatctgaggtatctagatttggggctcgattcttttacggggaaggggtgagtaacctctctcaattctttgcctttttggtgatatggtatgcggttctccattgtagcgagtaataatggtttgtagagaaactcagtttgaggttatataggggcgggtaggaacagatttgaaacagagtttaaaaacagggattgaaagatttaaatatgttttggttagtaaacagggatggttaccaacattgagtgaggagatcttgtgactttaatgcaggttgagcaaggcggatcaaagtttgttgaagaacattgatgaacatcatcccagcagaaggaaggatcctctagattttgccgtgatttttgaaggggaccaacggataaaggagggaaagctaaggagatccggataatagcatgtttcaaaaattcctctggaggagtgcctgggaggattttgatttgctatatgcatgtgtgtttatttcttgtttaagtttatttttatggtataacatcaagagaactatcacaaagactcaaaacaaagttatttctcttatttcttttgctttaatatttgtcttcccttgttgttgtaagaatcttatattacctttctaagcatagagtactttcaacgtattattaatattgttaaccatcaatcaaccaaaaattatttatgtagaaagaaatcaaaatatgaacaaaacaagtaaggaataatttgcaaaacaatagtaatttattaaagacaactttccaaaacaacaaaggaggacaacccaatgaatgctaaggacaaatcaaattgattaaagtatgtatgagtaaactaaaatggtgcttttctatagtgttttgttaacccaaaacttcattgatgatccattaggggacttgaccatccacatttaaagatctttatgtttcatacaatgaagatggaaacggaaagaaatacaataaaccaatacattcaaagattgtacatttacatcaatatacatatacttaagcttcctatgagtattgtaataacaaacaaaatcctaacactttggataactatcaaattttgataacacggaacaaatactaaattaacacaaatcaaccaatagagtgaaagattatccatttctatcaatatgcatataaataagcttccattgagtattataatcacatatttctgaggtttcagtcgtaaacagcttccattgatacactccaaactaaatgaacaaatttgattatcttttattacatggaagaaaagctaagcctagagataagtaagtaaataaagatggaaactttacctcaaagaacaaacatgaattatatcctttaagttcaatgacgtcattcaaagtcgcgcctttgctactcttacattcaactttattgtccttcttacagtgtggtagaagtgaaaccattttcaacatcaaactccgatatcttcacacaaaacacccaaaaacaaaatcaatttcaaaccctaaaatgaaatcaaaacaaaaaaaaaaaacaattttaaaaaaaaaatcaacctcaaattgattcgacgagaacaagtaaccaaacctcctctttactcttgaatccagatgaagtcaaagctttagctttcttcactcttatcttcccatcccaaaatggtcattttgggtctttccggacacatcgcttttttcacctgtggtggagctaccatctcgctgtgctttcgcttcttccataagttttggctttttcgcgaagaggcgttgaaaagtgaaatcaacgcaaaacaaaagagtagtctctaaggttttagcagagacaaaacagagaaaaaaacgaatggaccggttcatattgggcctaaattaacaacggtaacgatgtgtaaccacttcgttgttagtctttgttcttcgcgatcctttgcagcaaccgcttagtgagaaagagaaaaatttccattgtatttttaatttaaaatctacacatataaaaacaagactaatataacaaatgcattgcttagatatatataactctataaaaacaagactaatgtaacaaatgcattgcttagatatatataactctataaaaacaagactaatgtaacaaatgcattgcttagatatatataactctataaattaaacaagactaatgtaacaaatgcattgcttagtgatagttagtttggtccattgtcctataatttttggcatccgaccggtaacgtccaaatcgtttatataactggtagcgacatgaaaaaataatgtaaaactatacacagattacaataatgtagaaatcaaaagagaaaactaaataatatgcgaatttaataaaaataaaatcttacacttctccagctctacaagattagcaaatgactaaggtatcccccctttaatcaaagattagtaaaagattagaagttacaattacagactaaccaaacccaaagcaaaccaccctttgcaacgcgagggtctcctccctagttgtatttaaagagttaagatacggtcaattacgttttttcaaaacaataaacatgatgtttaaaaaaatgaggttaccgtaaaataatttgatgttaatcatatacttgaaattataaaaaagaacttaaataaaaatacaaagtaaatctctaatatatttttctctttttgctatgtttagatatttatttaataaaatgaaatttaattgaagtttaagagaaaagatacatatggaaagcagagatgtcacatctcaacttctcaatgcttgtttttagagaaactacaacaattaaaatttatttattaaaatgatactacaataagttaataataatgttagtaatagaaaaaggagaaactaatcataggaaaatatgtcacatgtcattaaaaaaaaacttttataattttaattattttatcagaaaatcaggaaaaaacaaaaggaattttattgtctatcagaattattcggaaaacaaatgtgctaattataatgttgttgtttcctatattttttagttttctaatcattttgaattttaatccaaatttgttttatttcctatattttatctatttctaatcattttaaatttaatcacaaatttgttttatttactaataaacacattgaatttggatccatatgacaatagacacatatcataagccacttatcagcttgtagtagcttgtgtttagaggtaacattactttattagataagaaaagatattttaatttcgcaaaactttcgttatcatatttaaaattatttggaagaaaaaatgggttttgtgcaaagaacccttaaagacgcccatttttcaactttaccctccacgtccaaaaaatgcaaactaatcctatgaaatctaaaataatacgcaatatagctcatttttgcaattttacatatattgtaaacgttttcatgatcatatacatttatttttgaaaattttaaagatatagttgaactcttcatcttgagggatttgattggatatatataatttatcagaatttagatatttgacaataacaataaaagactacattgtgtattattttggatttcataggattattttctattgtttgtacatgaaaggtaaagttgcaaaaatggacgactcttagattattttgcacaaaacccaaaacaaaatgcttggaaagaaagagttatttataaaaaaaataattattgtagaattattttcaagcgcatctgcctttatattgagcccacgtattaaggcttaaggttgggccttgtattttcttttattggtacgtagtgtcactgaatgtcttttttggtttttcctctatgacactttctattagattatgtgtaatgtaacttgtaatgaatttaagggctgctaacttttgtatataaaggcagacccatttgaagaaatgaaaactttggcttatgacctttttctaagaaaaaaagctgaagaacacttaaattttatatattgtaaaattaaggataagaggagttttgaggtcttttagatttttttttttttttttaagttatgagatctaaaattactgttaaatagaaactaaaattatacattagaataaaaagttagtgtaattaggaaactaattcacttttttttcccttgatattgacatcaagcaaaacacataaataagttgacgagtaagaaaccaagcgaaccaggacttaactaatcaggtggaatccaaattgatccagccaatcagtcggatcaacgtaaagaccgacctggattgtaccaaaatcaagcgtagttatctatcgaagaattcactcaacaagaagacatcatcttgaagatgcatagaaaatttaaccatttaagagaactatcgaaaaatgttgatgattatggagccaaacaacacaacaaccataaaggcctacccaccaaaacttgtcacgaatggctcaaacactctgattgagcaaaaccgttatttccaacggtatgaattcacatgactccacactcttctaagttcagctctacaacttaccacttctatttaagtgtttgttcgtgataaatttatcggcttccaggttttgggaaacatcctctatgaaaaccttcttattttctagtttagtactcaaagttgaagatttatcagctttctatgcctctttctaactgtcaaatatttttcgttttcaaaaatgaagcaaaaatttgcacagttctttttactgaaataattacttatgttataaccgaaaataatgaattaattacttcgatagcataaaaaagtatttttatttctaaaatataatacattttttcaattactcatatgttttgagcatttgtataattacaattaacacccttaattagtttttttaattaataaatttttaatttatttttaagtaaaaataataaataaaaaaattgattatccatgtcattaacacatatcaccaatatcacaatcttcaaactcactttatttccccttttctcttttttttttgtctccaaatccaaaaaatgcttttagatctaataatctccaactaacttgggtattgagctagatcttcctagaccttacacccacaacgtttgtcatagggtcccaaatcaaaagcttcgtcaaatcaaaagtcatcaaaaatcaaaactcaaatcaaagagatctatgtaatttaacatgattcgttacaggtttgagttgaaatcaaggatagctactcttttactttgattttacatgtctcgtttagttttcctctcaatcgatctatttggcgatatttctacttctatctatgttttgattcatacggtttagtcttcctcctatgtatccctctaacatattcttaagtttcttaatttgattgtttttatttgaccaacaaattttatattgtcttccctaaaaaaatgttgctttccgatctatattataaatcagtcgtaaagtgatgtaactcagtcgtaacgtgatgtaactaagctgtaacatatactttagacaacctttcgtcttccctgaatgataactcagccgtgacatgtaatttaccaaacctttcgtctttcctgaagcatataattcagtcgtaacatataatttacacctatctttcgtcttgccttaagcatataattcagccgtaatgtaattttaccaaacctttcgtcttccctggaacatataactcagccatgacatgtaaattgaccgaaacttcccttaagcatataactcagccgtaatgtaattttaccgaatcttttgtcttccttggaacatataactcagccgtgacatgtaaattgaccgaacatttcgtctttccttaagcatataactcagccgtgatatgtaaatctgccgtgaaacaataagagacacaacattccgtctacctttatcatcaagcacaaatcaaaagtttgtcatgcgttgtttccgtatctatctccacaactctacaccctctttcatcggtgttaaatatgtatttgtgcttttatacccaataaccggaaccggatcaaccatatcggaagaatgatgaaagaaattgaagaagaatgagaaagacgatgaggaattaaaagttccggtgatatgaaaaactcaggtgaagaagacgagttggtaaaaatttggccctttttttgtcctttgatgatgatgacatggaatgttgcatccgaagttattttttaattgatgaagtggcaagtaagccaccatacgaacatgtaaatttgcctaaataaatcagccatcaaacagaaactataagtttgtcgcaacatgaatactattacagtaataaaaaaaaacgccaagttaactcagccgtttagagtcgtaactcaactaacaatcaataactcagccgtatcgtttattaactcggctttaattgcatgctattataataatttccttttgcaactaagtcagctgtaacaaggctgagttatcggttaatccagctctttgcggctgatttatgacactcaaaaattactcagccgtaatgacatcccataactaagccgtctttgataatccatccagccggaaaaagataactcagtcgtgttgaggaaataattcagccgttttctaataactcagcaataacgttgtctgggttatgctcgatattcttataaatcagacaaatttcattaacttagtcgtaacgtatgctggttatctcataactcagacaaattttataaatcagtcgtaacgtaggctcggtttactcataattccgttattttttcataactcatatatttttgtcgtaagtcagccgcaacatatcgtaactcagccgtaactgccgttgtatcgtcttacggctgagttcattaatccacgtcagcgatttctgacgtgacagttgtattccttgtaattacgttttatcctataacgtttagtaggggcacgatgggtatatcgaaaaaggcctaaaaatgttatgtatgattttggtgaatacacctaattctaactatccaagtaaagttcccaaaaataattggttctataaaagttaagtatttacattcttctttaattaattatatgtaatttttaaaaatgattttacttatcatattttttttttaattgataagtatgatgaattagttagtcttatctatgcataggctgtctagaatactcccgtaagattatttttttatagtaagatattcggttccttgtttttaaacaagccattgaattagtttgttcattattatttcatatgattcaatctaaattgttgaaaaacaagtcaatgcaaattatgataactaggttttaacccgcgatttactgcgggcaatcggtttatttggtttttatactaaatatttgaataaatttgatatcctaaatttataaatataaatttttagtgattagtgaagaatcgtaatatatgatttggatattattgattattgatttcgtgattgaatatagtgtttttaaggatggaatgtgatcatattttgatttcaaaaacgacatagattccttatttttgtttaacggtttagattgaacggaattaattttattgaacagtttagattgaatcggatcatataaagtttagaagattgttaagaccaatttacccttaatgattttgaatagcaaagaataaaatctaaaattgaaatcaaaattgaagccaaattagacaaaacttcgattcgtacttcccttttaataataaagagatatacttggttaattgttttctattgatatcatctaattctcaacctctttttaatttttgtaagtagtaatgaacttgactccatatggaaaaagtgctcatttttcttatatataaatatgaacatttagatgattcgacattacatgtttattaaaattttatctgtatatttttctaaaatcatttcaatgttgatcaaaatatataatttagtagtttaatttaatgttactaaaatagtttaaatacacagaaagtgcatgttataaataattagaaaatttattatctgcgcagatcaaatatcaggtgttagtaacatcaaaatagtagccagaaacgatagagacttaaagacagctatgaagggtctggcttcgaagtaaccaactcttcgatacattgctatttatgtatccaagacagctaattacttgaaacaaaaaccttcaaagttcctattcttttatcctaacttaaaacccctctttgataaattaaataacgaaccaacgtattgtctccatgtacatgttataagcaggaacagccaaattaacatgattttattgagtggcacccatgtgtcggtttttaatggtcggtccattatttcatttagtttatattctaagcttcctgacattaaagctgaagtttaagtattttatctacttacttaaaagtagatcaagtagtcgtgtgaagtcaagacagtcttgaaatggtaggattggcacttagcagtgagcaaagtgtttgacttttttaaaataacctttaatcaaaccaaaaatggttgactttttctaaaacctagttttttttatttagtggtttcatatttatttgtgattcagttactaacacgcatcaccactttggaatctcgatacacattcatgtgtataagaatctataaaaaaaaataaactatatatgattactaataaacatgaatgcctgtttctgcaaatgatgagtacattcctcatgaagacagcagagaggatccagtgcccgctcaacattttcatagtattgtttggttataaaaaaatcttgtatgataattctattaaaaatttagttaactaaaacaaaaaacaatgtactaaaaatttattggttcattctaaattttatttttgtgttatatctaatcttttttaatatttacaaaaaaatatacccttaattattagaacataagattagatccctagccgtcgcaccttccgcccctatctgagccggtactgaggatcagtggtagtaaagcaacgatcttaacggctctcagcaaaaaaaaaaagaattctaagccacgtaatattttaaaaattgcagaggaaaataattgtaaattcgtttttttttttgccttttctttatgtctctctaaagttcaacatcccattgagtaactgattttttgttgaatagtattcttattttcttctaaaaatatgtaatatgtaagatacattcactgtgctccgagatcgcgcaccactatattatatctcatgatttcatagaattttacataatattttttttttaatatgtacatgataactgctgaatattgagtttgaagacagttccatattgcacataaattatgattttatgtttcttgtaggaattatgtattatagtagatattcattacacattatgcccgatataactgaagttggaatttaaacagtttgtacataaaatataatattaaaaagatatttgtgaaagggttaaagttaagagatgatttcaaaccttcccaaattctggtttggagtgaaactattttcgtccgtttgaaatatacatgaatatatatatatggttcaaccattagaagaaaatttgagatgacaataagttgtttacgtgataatattttacgctcaagttaacgacaaaattatgagtatgatccagtgttaatcggtaatatggttatatgagctgtaaataaacaaattatatatgtgtatggagcggtttttgtgtggtccttaatcacaggactgagcaaattatttttgtcatttgcaacgaagtgcgttagatgttcaatgtttggtagtatcgtcaaaacttgtttgtctaattttgctaaacaattattatttaatttacacgaagtattgttaaatgtttttttattacatttaacttttgtatattgttttttactattcaaaatttcgaagtatttatcgtgaattagactattcaatcaagccatcgcattgaacattgcttctacttttaaaaacagttcttaatgatcattaccattgattacattgcttgactgcttgttgaattacatgaggagtttgaattcattaagaaagtaattgtattgctaaaaaagttagttatcaatcaaaatcaatatttaagaaaacatcgaccaatacgaaaattatcaaaatcaaaaataaaatgactaagcaagagattaggacatatatctagtcctcctgtagttcatataatgcactgcaattgagtatagggacatcaacaagaagacaaaagagagacagaaagttaattgaatgggatcaataaaataagaaaaaaagtaaacaatatctagttagcaaaaaaaacgaaatttaatgttagagaactgaaaaaccagctggagccaatctatatgtttgtttgcaacacctccacttgacttcttcacagtcacttccctttttggctctttcctattattaagtactaaatcttttcttgttaaataatctaaaatctctttgaagtacatcgggagaagaaaaaaaacactttcaaaatatataaaaacaatatttaactgttctttttctgttttttgtcgtcaatttagaaatattaagcttgatcaacgaaaagaatatgtacaatccgcacgtaaagaatgttgtcacacacccactaaagagtaaacagaattcgtaaagggttaaataaataatctcgagcatagtgttgggtaaagactgtaaggaagttatgttttcttattattcacgagagaatgtacaatcaacactataaaaactctaaaaatcttttctgtgctgatacatcaactttttcaagtgttctcagaataacacctcattaaaatcaatagccaatcaaaacatttcgattaatacacctcatttacattaaccaataaaaacttactatttttttatgtcatctcatcaacttaacaaaattaaaattagatatgggtctaacccaaccaaactactttcaaaactaagatctatataaaaacatgggcctaaatttcttaaataaattatacaaaatagaaaataccaaaaatattatattattatgataaatgtgaaatttaaatataactaataataaaataaaattcttcctaattattcaaactaattaaattttatactcaaatatgcatttgcttcataaaaaaacatcatcaagtaatatgcaaatgacaaaaaaagattatgacaaattaaaaaaaaatattttcaaattttgggtgttccggattaataatattattacaatacttagttagtatcttatcattcttcagtttggtttgatgctatgattttgatagagaaaaaactaacattttaataataaaaatcaccaccatatattaaagttttggggaagaagcttacactgaaaagatgacattgtgtaaacaagcaaaaaattattacaactaagatgtcatttttgttctttaaggtctaattaaatttatctttgaggtatggttactctcaaatctccaatgatcaattcaattcttgtccctatttttattttttaagtgcatctattatctattttttttggttcaagagcttatttctgaactgaatgaaatcttagtataagataacatcgaggaaaaaagtcaatggaagaagaatcttaaagaaaagacattaaagatttttgagtttttttctcaaaatattcaagaatcttatcagatttactaagcgtcattgtggattttaatcaataactaataatcatttgagaacgttctatagtcctaataaaaaaaatcaattttcaaattctgtaaaacaaacaaacatagcttttacctttttatgcctcttcaacatatgaatcaagtatgcatgtcgaacattaaaaatcaaagatgataactccatataacatatacttaagaatctaaaataaaattaacctcaccaaaattagcacatggtgatttttaactccttttattttttgttttttaatgactcttctaaatagatgttcgtaaagcaaaaaattagcttccaaaacttataaagattatataaatcttactaaaaaaatcaaaatcaaaaaatgcattgtgtttccaatcactttttaataaatctttttgttctacatctatcatgaatcatgacaaataacattcaatacctacatacaacttaacaaaattatatttaaaaaaaaaaccgcggcttggcgtgggtttcgccctagtcctttataaaggaattacagaagaagattctagactatcgtcatttacacagtttctataagtgtgtcaatcaaaatatttttatgatcaattagtatccttgacacgcaccctcaagatggaggtgctttagcaacaccaatcttgtctcgtaattcaagaaatttgctcgttgtagtggttttgttaaagcatccgccagttgatcctttttattgacgtgagggactcggagagcaccggtttgaatttgtccacggataaagtgataatcaatggcaatgtgtttcattctagaatgaaagacggggttggcacaaagaaacgttgctccaacattatcgcaatatatcactggaggtgcagatagcgtaatgcctagctcacttagaagagtgcatatccaactgatttccgacgatgcattggcaacagctctatactccgcttctgtagaagatcgacctactcctctctgtttcttagccgaccatgagattgggtggctaccgagatatactatatatgcattcgcagagacgtagtcctctgtatcgccggcacagtccgcatcagagaatgtatggagagtgagagtattcttagcagcaaagaaaataccgtgtgttgtggttcctgcgagataccggagtactctttttgctgcttgggagtgatcttctgttggtctatgcataaattgaggcaaacgattcaccgcataggagatatctagtcttgtaaatgctaggtattgtaagcttccaacaagctgtcgatatgtagtcggatcggagagtgttgtacctgagttggtggtcagttttggtgaggacgccatgggtgtggaaaccggttttgcattgatcatgtcgtggcgatgaagaagatccaaaatgtattttcgttgggatagatgaagtccttgtggtgtgcggtgttcttcaaggcctagaaaataatgtagttcttcgggatctttgacagagaatctatctgccaacaattgtaagactcgtttgatgccattgtcactgttaccggtgataataatgtcattaacgtagactaggagataaacaaattgcgtaccacattggagaacaaacaaggatgtatcagcgagtgagttccgaaatccaagactgaggagatagtttttcagctccatgtaccaagctcgaggggcttgtttcagtccatagatggctttgcggagacggcagacgtgtgatggattgtcagcatccacaaatcccggtggctgctccatgtaaacttcttcattcaatgtcccttgtaagaaagcgttattgacgtccaattgttgaagtggccaagagcgagtgacagcaacatcaaggactaagcggagtgttgtagctttgatgacagggctgaaagtatctgtgtaatcccgaccaaattgttgattgtacccctttgctacaagacgtgctttgcacctgttaagagagccattagagtgaaacttgtttttaaaaatccacttacagccaataacattcatctgaggttgccgagggaccaaatcaaaggtttgattcctagcaaaagcatcaatttcatctgacaaagctccacgccaatgcggatcatttaacgcctggttcacatttcgtggttctggtttaatgtgggtggagagggcaacagaaaggttgtatttagtgtttggtttggtaatatggtttttgcgacgagttttcatagggtgagcgttgtcgactgagcgaggtggaacgtttggctgcgaggaggacgttgaagtattggtttgtgtcgtgggttgggttttggattgttggttatttgtggtggtagtaattgggcttgggttgaatttgagttttgagtttctgggttttcagtatgggccagatttgggcttgaggatgaaggttggatttcggctgaggaggatgtatctactaacgcagtctctgtagaagttgccggcgaacgtggtgattggtgaagatcgaagctcgtgggtcccagaggcatcggagcgagtggcacggtgaccggaatctgggagacgggaatgaatggggaatttgagcttgttggaagtgatttatcggatggaggagttgagtgagtgaaggggaacacttgctcatcaaatttcacatgtcgagaaacataaatcctgcctgtggatgtttggagacacaaatatgcgctttgagttggtgcataaccgatgaagacacacggagtggatctctcttctagcttgtatggccgtaaccatggaaaataaagacatctgaatgtgcgaagctttccgtagtttggtgaactgccaaagagcttctgatatggagtttccatggctattgtcggagacggaaggcgattgatcaagtatgttgcagtggtaaatgcatagctccagaacgtctttggcatcccagcgtgagaaagaattgcacattgcgataaacagagattaggtttgtagcaatgtggggaacatataaaacattctgtaaggtaaggttacgagaggatgaaggtaaggaaagtaaaccagtatgtgttatttgtagacccgagccatcaccaattaggactgagtcatcgccagggtaaggttgatggatagcgaggttgttgagatcactggtgaggtgatgggttgcgcaactatcaagaagccaagcatttgctgggtgcggggatgcaagcgctaggttggcattgggctgccaaggcggataagacacattccgtgaattgttttgttgatgttgttgaagttgtagacaacgttttgcactatgtccctgtactccacacagttgacattttccttgatagcctttgctgaatcgagagttgttgttattggtgttcctctgaaactgctgattgttggtttgtgattgccatggttgaacggaccggttattctgtttgcaggacgagtgttagcgatgtcagcagaaacgggaatcaccggggagaaggacgtagttgtggacagcagcttgttttccttgttgagcaacttctcatgaatctctggaatggagggaggggagtcacgtccttcaatctgctctatgacgcttttgtagtcttcacgcaatcctaggagaatgtgttcaacttgcttttcatgttgtagaggtttgccgagaagtgctagttgatcaaacttagtgatgagaccttgcatatattcatcgactgtgtttatatctttggtctgctgctttaattggatgcgcagttgttggatgtgaccccagctcggcttggcatagatgttggcatgtgttttccagatttcattagtggtgagtgctctagagaaggttgactggaccggaagagagattgcaccgatgaggccacgagtggataagcttatcctggcgtttccatttggtgaaagctgaatttggtgtaacgacaccaatgatttcaatggtgggtggtggtgcaggcagtgagccatcaagatgaccggcgagatcatagccatctagaagtgcatggacctgaaggctccacatcaggtagttgccagcggtaagttttgtgacattggacatgttcacattgaggagagcctgagtagtgtcgattgcatcaatagcagccattgtgtgagagaaagaaacaggagatagaaaacagaggagaagaaaaagaaaagagattatagaggagagaggcggctgcgagaaataaaaagaatttagaggtttctagggtatctttttgctcttgataccatgtaaagaagatatgttttcttattattcacaagagaatgtacaatcctttataaaggaattacagaggaagattctggactatcgtcatttacacagtttccataagtgtgtcaatcaaaatattcttatgatcaattagtatccttgacaaagaccaaatgtcacacatcaaaaattttaaaaatttagattttaatatataaaccaagttcaattccaactaatatgagatttttttataagaaatctaataacaaatttttgcaggtttgaatatctaaggtcaaagaagacaatatcatattaaatagaagttggaatgggcttagaaagcctattaaacagaacctaggttgaaaaagtggatctagggcttggactatgattggtgtggggagaacctctcaaacatgacacgataaaaaggtgtctcaagaatttcacgaataagaagggtgcctagttaagggtgctaaagtttcgttaaagaggaggtccaagttcgtggtctttaggtacaaaccaaaggtccaagttcgtggtctttagaaaaagagtttctaatatataagctaagtccaactccaactaatatgaggccttttgggaaagaatcaagtaacaaatctttgcgggcttgagcatgtaagcccaaaaaggacaatatcatactaaatgggagttggaatgggcttagaaaacccattacatagagtgtgatatgtattaatcctgaaatatggggtagagaaacctgaagccggactccatgggattcttcatgatattcttcatccatcttcagtttcagtaaaatctgttttattttcattccaagagaggaaaatcgtgaggctgatgccttagcgaaacaagctcttcgtaattttgttgagttgccttaatggccttaataaaattaatttctttgccaaaaaaaaaaaactgaagccggacattaaaactctttgagatcgcactaacttggtaatcaacctttttaggaaacgtcaagcagaaacgaaagataaaaaaaaaaagattaataactctgatattcaccagcttataataccattaattgaccgataactaacataatattctaagggtaaatacctaataatacactaattttgcttagaacacgtcaaacaaacgctttttatttatttttattgataataagcagtattattggttcctaatttaaaaaaaaattgatgaataccttcaaatcctagaaagtaaataaatgaaagattctaaactattattaaagagttttttataatcttgctgattagtttttcataatcttgtaaagtttctcaaacaatctctctattttgataatacttttcatgactttactttgtaaaaaaaaaatgtaaaaagtcatgaaccaataacatagtaatttacatcattaacaatcagagattcttttgtttgaattaaataacacaaaacttttactgactttataagagtatgaatccaataaccccaaatttatgaagattttagattaccttttataaatcttaattgaataacacaaaactttaacataccttaaaaaaatcttgattgcataacaagagatttacatgacactttaagtaactaaaactcttttcaaatcataaacaaataacaccacctaaatcttttacaaggattctattatctcggcaattatttgatatattttacccaaataatcaaccctgactaaaaataaatacaagccaaattctcttctttgttttttatcacacgcctgtaaagaagagaattacaaacatcaaccttctaagcttttgctaggcttcaaaggctatacatgtatgactatattatagagtactctggtggctcaatgcctactcatttatactatactctagaaccctagtccctaggatctctaagaatcaatgagcaaaaatttccttgatctttcaagcatatccatttccttgtttgggatcttccttgatattcaagtctatccctttccttgttcgagatcttccttgatattcaagcatatcccttttattaggatatacatgaatatatttacttagatatagtcttattaagatcaggcaacatgtatgtgtataaataatcttcttcttctattgaataaaggaacgcattacaaaatatttcatggtatcagagcattctgacctaattttttcttcttcttcttctttcctgccgtgctgtcacgtaacttgaccaccgcattttctaaaatcttctaaattcttctatttcgatactaccttctatattttttacacccaccatgtcaacagaagaagcttcttccaggaatcaactcgtcgtcgccaacacgaaaccttccaatccctattcactcagctcatcagacaatctctgagccttgatttcttctgttgtgttaaaggaagacaattactcagaatgggcaatgatatatccctatttttactgtttttaactatgttttaggtataggttttagagtctaattgttatttctagagtcttttctagtctttttcaggtctttacatgtttggatgcatttggagataattaagcattctggagatcaacagacaacctaagctgcagaatcaatccggagacaaaaatgcacgtaggtgtcgaacgacaccacccctggtgtcgagcgacaccaatacctgacggcaattttgagacgcaacttattaatgttttgaagattttcaaattcggcccagaactttctcctctgtttaatgaaggcccatcccgtgttttagacatataattaggtttttaggatcattgtttagacctaagcttggagaggctattctcctcatcttttttgtactttgggagcaaaaccctgtggagactcctttggagaagatcttttactctttctcttgctattattgatttcttatttagactatgatttgtgtttctttgattatgtctgagtaatccacttgttaggtttagggtttctcattagggattcatatggtttaatagatctccccctgctaggttatctgtagaattcttcatctttaattgttcttaatgctagatctagattgatcacctagaacttgaatccaaacaatagatatgcccgccataggtatctgtagttggatctattatttgatgagcctggtttataggtgtgtaataagaatcggcctatctactaaggtgaacaatcgaactcgttaagaatgcatatttaggttaataatctctcggcttctccggttattcttagctatagatatagggagtttcgcggcacgcccactggttattccataattagagtttgagtttaaaaatggttcgataacaacctagctattattagatctactaaccaatagtttcctgagaacaccctaagcctgacgtttttactttcttgtcttacaacctcacaatctgctattgcttccttttgtttctttttgttttcattactatcttacttagcttaattcaaaatcttggtctattgtgtgatccgagagttttgtggaattcgaccctaaagtactacaatcgatctgttatttgagagagtggtcttaaggcaatttgacctatatcaaatttggcgccgttgccgaagttctctacgattcaccattagattaggattagaattttgtctaagcatttatttttattttttttacttaatctttctcttttttttttttcttgtgtgtttcaggtctttgtctaatcacaaaaccaggaacaagcgagaaacatgaacgagagtaagattgttgggatcatggctaagcttaatgcggtccacaatcaacttgtggaggatgttgattatgttaggagcagaggttttccgaatcagagatttgatcaccaacaaggctacagaggttcctatgggaatggtccaactagctacactcagaattctcagttccagcacccgcttcagaatagcaatagtttcagattcacaaggaactatgatcttgcttcttaccaagccccccgtccacccacacctaaaagcaagatagaatcattgctggaatagattatggaaggtcaacagaggatcttagagagacctatccctaaatggcatgagagcagcctcactacttcttggcattctgcttcaatggaaagtgagtatgagttagtgaagattgaggagagttacgattttgcagttgcagaggcagtgtcgaacgacaccaacccttggtgtcgatcgacaacatcggatatatacgagacatcaggctgtgacgaaacagaatctactaggctcgacattgatctccaaaatcgctcgactcacattcatattgtcgccgcaaattccttgattgtaggctggattctttcgatccaaaaatcagatcgactgtttcgttcatctccaaagcgtcgttactttgggaaagtcttcgtgttcgcttctctgttggaaacggagtgcgaaaacaagttctaaaagatgagattgctttgtgaaaacaagaaggcaaacctgttcttgaatattacggtcgactgtcgaaaatgtgggaagagcttcaaaactacaaatccaaccgtgtgcgtcgctgtgaagctgctcaagataccacaaaagatcgtgaggatgacaaattcatcagttcctattcgaacttgatctgcctcgttttgctcccatacgttctaaaatcactgacgaagacccactaccttctcacaatcgagtttattctcgtgtaatccgaggacaacaaaatttggatgttgcacgatccaaagaaacgaccaattcagaggcaattaatttttccgtcaaaacgccatctgctcctcaagtagctgctgtatatgctcctaaacctcgagatcgttcatgcactcattgccatcgccaaggacatgatgtgacagattgcttcttggtccatgggtttccagaatggtattacgaacaaaagggtgggagtcgtgtctcatctgataacagagaagtcgtctctcgcttggagaacaaaccggcgaaacgcgaaggtcgttcgagcaaaggtaacggtcgcggtcgtggtagagtgaacagcgcacgtgctcctctttcatcttccaacggcagtgaccagataactcaacttatctctctactacaagctcaacgtcctaaatccacatctgaacggttatcgggtaacacttgtcttactgatgtaattattgatagtggtgcctcacaccatatgacaggagattgctctatattggttgatgtgtttgatatcataccatcggctgtgacaaaacctgatgggaaagcttcttgtgctactaaatgtgtcacactccttctcagttcttcttataagcttcaagatgtgttatttgtaccagattttgactgcacgttgatttcagtttcgaagttgctgaaacaaacgggttctattgcagtttttactaatactttgtgttttttacaggaccgttttcgaggactttgattggagcgggggaagtacgtgagagagtgtattatttcacgggtgtcttagttgctagtgctcacaaaacttcgtcagactctacttcttctggagctttgtggcatcgtagattaggccatccttctactagttttttgctttctttacctgagtgtcatcaatcttcgaaagatctaggcaagattgacagttgtgatacttgttctcgtgctaaacaaacacgtgaggtttttccaattagcattaataaaactttggaatgttttgatttagtttattgcgatgtatggggtccttatagaacaccatccacgactggtgcagtttattttctaactctagttgatgactactcacactcgatttggacatatcttatgactgctaaatcataagttccttcattgatacgaaatttttgtgccatggctgaccgtcaattccgtaaaccggttcgctccatccgtagtgacaatggcaccgaatttatgtgtcatacatcgtattttcaggaacatggtattttgcatgaaacctcatgtgttgacactccacaacaaaacgcacgtgttgaacgaaaacatcgtcacatactgaacgtggctcgtacatgtctttttcaaggaaacttcccgtaaagttctggggagaaagcattctcacagctacgcatctcatcaataggacaccgtcacctgtattaaaaggcaaaacaccgtatgaggttctgtttggcaaacaaccctcttatgatatgcttcgcacatttgggtgtctctgctatgctcacatacgcccccgcgacaaagataaatttgcttctcgtagtagaaagtgcatcttcattggttacccccacggtaagaaagcttggagggtttatgatcttacaactggaaaaatctttgcaagtagagatgttcggtttcaagaagatgtgtatccgttttcttcaaaagagacgccaacagagctaactatcaccacacctcctattgtagccgattatgattggttttcacctgtcttgaatgacagatcgatcgatcactaaggagttgactctagatcgatcgatccgataatccttgtttcagaaactgcgacaccaaatactcatgattcgatagatccgacttctacttcttctgatgaaaacaatactccacccgaaccagttactcctcaggcagaacagcctcattctccgtcttctatttcttctccccatatcgttcacaataaaggttcagttcatagtcgacatttaaatgaggaccatgattcttcttctccgggacttcctgagctgttagggaaaggtcaccgtcccaagcatcctccggtttaccttaaagactacgttgctcataaagtacactcttctcctcacacttcttctcccggtctctccgattcaaatgtctcgccaacggtctctggtaaaaccctatctcagattatttaactcattctggtttttcagcaaatcacatagcatttatggcggccattcttgatagtaatgaacaaaaccattttaaagatgatgttctcatcaaagaatggtgtgatgcaatgcaaaaagagatagaggctcttgaagcaaaccacacgtgggatgttacagacttaccacacggcaagaaagcgataagtagcaaatgggtatacaagttaaagttcaattcggacggtacgctagaacgtcacaaagctcgtcttgtggtcatgggcaatcaccagaaggagggcatcgatttcaaagaaacctttgcacccgtcgcaaaaatgacaacggttcgtttgcttctagctgtcgcagccgccaaagactgggacgtttttcaaatggacgttcacaatgcttttctacatggagatctagaacaggaggtctaaatgaaaattccgcaaggtgttaaatgttctgacccatccaaagtatgtcgtcttcgcaagtccttgtacggtcttaaacaagctcctcgttgttggtttgctaagttgtctactgcacttcgcaagcttggttttactcagagttacgaggactactcgttgttctctctcaaccgtgatgggacagtcatacattttcttgtttatgttgatgatttcattattgtaggcaataatctcaaagccattgatcacttcaaagaacaccttcacaagtgttttcacatgaaagatcttggcaagctgaagtactttctcggtctagaagtgtctcgtggcgctgatgggttctgtctttctcaacaaaaatatgcattggacatcataaatgaggccggtttgcttggttataaaccttctgcggtacctatggagcttcatcacaaactcggctccatatcaagtccggtctttgataatcccgcgcaatatagacgcctagttgaccggtttatatatctcaccataacacgaccggatctcagctatgcagttcatattctatctcaatttatgcaaactccgttagaggctcattggcatgcgacacttcgtcttgtgcgttatctcaaggggtctcctgatcaaggaattttactccgttctgacagggctttgtctcttacggcctattgtgactctgactacaatccctgccctcggactcgtcgttctctctctgcatatgttctctatttgggcgacactccaatatcgtggaagaccaagaaacaagacacggtttcctcttcctcggccgaagctgaatatcgtgcaatggcctacacactcaaagaaataaaatggttgaaggctcttatgacaactcttggtgtcgatcatacacaaccaattctgttattttgtgatagtcaagcggccattcacatcgctgctaaccccgtctttcacgaacgcactaaacacattgagaaggattgccaccaagttcgtgatgcggtcacagacaaggtcatttctactcctcatatttctactactgatcttctcaccaaagctcttccaagaccaactttcgaacgtttattgtccacgttaggtacttgtaattacgacttaccaacgtgagggggggggtattaggatatacatgaatatatttacttagatataatcttatcaagatcaggcaacatgtatgtgtataaatactcttcttcttctattgaataaaggaacacattacaaaatatttaacctttccttatttgttgagaaggatatttaccaaatcttctcaatcgactttcgtctttgatcacgacgccaagttagcaaatctccttggcttgtcacatcaaccactccagctccgcaatgtcagctcacacatccatgtcagcaacttagacgtttgatgtagatctgttgcagcttcctaatatccaacaactccatgatgtccatcagctcgttgtcttgatatctaacagctatctgatttccatcaattcattgttgtctgaatctgcatcttcaagttattacacattacataaactattaaagaaaatatgtttaaaaaaaaaaaaaaaaagctcataagaaaaacgcatgtcatctgataaaatacatgtaagcatctcatatattacctcgatcaacacgacacggtttgtaaagcaagatgttggagatgtaaagctagggattcaacgcactaaatacgatcacctttgtcctatgaaaattatgttgttaacatgtttgaattatgttgtgtgttttaatacaaggttctttgtttgttaaatacagtctttttataattaggattccaaaaaatagaatataaaatgaataaataaacatgtaattagtcgtcaaatagttgcaatcaatcaacaaatctttaacaaaatagttgttatgtagtggcaaaaaagtccctatatcaattaccaataagtcaccaaagagtcagtatagagtggctaaaatgtagccaaacagtcgctaactcgctaattagcgatcaaatagcgacaacatatattggtcgttaatctgtcgctaattagcggctgtttggcgactaacagatttagcgacgcgtggtttgccgactacgtgttttagtcgccaaaaaattgtatttatgggtttaacgacgtttaagctacttattgtgtagtcgctaattccatattttcttgaagtataatctaaactggtataagtctaattttgggtaaccatatgcatgagatcatgcttctccgcttttttttccgaaatatgaatgtatgtttagtttttatacttaatagtatcatgttacaataatagaaagaacaaaagaaaaagagaaaatccatacaagacagagactctctcagacacaattatcgaggccaactctaccataaatttttccggcaccggtagagccgttgatcgccggtgtccagagctctctccctcacggcgatctcttctcaaaggttttatcatttggagttccttattgtctggtttcctcctgtttcaaacctctttcctccccttaaatccaaaaattatcacgaccaccctactttcgaacttgctctctggtgctagttcttccctcaaccttcccgcaatcctcgtggtttacccgcttcatctgctctccttgaagccaagttcagcatctccctgctcccctttggatcggagctctgctttggcgccgacgctagtgaagcacccaaccatggagaatccaacttctgtagatcgcacctcatctccagcatttgattggttagatccggtccctgaagcaagcaaattggtagccaaaaaccccaagtccgatctgctgtcgatggtgatgaagagaagaagcaataggcggctagacctaattcagcttcatgtctctcactttgggcctagcccttttcacttaggctctccctacagcccattacccaaccttttggaagcccaagaagagttctgctgaatcaagcccatctcttctatggcccaggtctgcttttaattttgttttgtcaagcccaattttacagaagcttttatcggttaggagtagtagtggacgctttcctgagataatggtgatgaagttagattgaatttgcagctctatttcatgaatcttggttgttagcctagtttgcttggtccttttgcctcattgttcaaatctgaatttgaatcgtctagggttagtttctctgtggaagtgtcctagagttttgatacccgtgtcaagttggcttaattttctatcaagtttcctccctttagcaccctctgactctgatttggctggttgtggacgccacgctaacagagtaatggttcctttagattggtctgatagttacctttgtcgagttcagatgttaagtttattttggaccctacccgagatcctcttccccacctattgccttttgccctttacagtgaagaagattgacattatgataccgcctctacggagtgggtattaccaaagatttttcacctctctacctacccattcaccaattatcgagttcagtcatgtgttaatatattgcttggataatttgcaatcctctgtttgtttgggaaagtacggcattatgaccatgtcttcaagaggtggttaccgtctctttctcaacctcgttaacccgtcagcctcctccgtggagcaccttttcaaaagctcagatgcattgtttgcaagagctgcttatgatcacttggtggtcgaggatttcgcgaagctcgccttcatggtcgaatccgacaaagcctcaacagatttttcaatccttgtaatcttttttaaaaacttcacatctctttggaaaactcatgaagctctatctttatttctttgtatcatctttgcttcattgtgtatgaaccttcctctttttgaggtttaatttgaatgaagatcttgtttgacaaaaaaaaaaatagtatcatgttacatttgagtataaattagtctgattccacactcttccagaatgatcattcaatctacaagtttatcatcttttttccatcttcaataggtgatctaatttgtttgtttagcttatatattatacatttaaactttcggatgcgactggtcaacaactcttggatagacatattgccattgatgcttcttgctgtaggtgtggagagccggagactattcttcacatgttgtttcactgccagtttgcgcagttagtgtggagtccgacaccgtttgcaagacactgggcaagtgttggagcagggagtgttcgagaaggcttgatcaccggttgtaagcttgcatgtctaccgccgactggaattgcttcggggcctttagctccttggatctgctggagtctatggaaatcaaggaaccaaaaagtgtttagtaccaggttcttcaccccagaagaaactttgttaaaggctatcacgaatgctaaggagtggctggcagctcaaggcaaatcacgtgaggggatacttctcccccgaaagacaggatgcacctcgacaaagacaggagacaagtcacattttcagtgtctcctgtaaagctgacggatcatggcgcaatgatctaaaggcagctggcttagggtggaccttcaccaatccggctggtcttacctctcatcattctgctctttgcaagaatgtatcatcacctttcatggcggaatctttggcctgtggagctgttgtcttggaagcggtcagggcaggggcggatagcttcctcctagaatctgactatcaacaattggtcgtcgcaatcaatgcccgattagttttattggaagttcatggaatcatttcatatatcttccttagcattggtagattttctcacttcttatgtcgcttcattcctctgtcaactaatgttgtggctgattcacttgctaaacaatgtcttagtttgtacggacaaaacatttgttgaacactaacatatatttggggtgcacaaaaaaaaaaaaaaaactttcggacgcgacaaaatattttagtatattgtattaagttgttttcctcttaaaaaaaaaattgtttgctttattttcttagaatatataagtaaaaaggaaaaataaaagtagaaaacaccttaaagaaaaaaaaaaactcatttccatagactatacaaacttactccactactcactccaccttaacttttttcttcatatgtaaattaaactgaattacattttacgttttgagatttttgggtttattaatgtatgaatgtcatctaaaatattattttctatttaatttaaattttcgacaccagttgatattgttggttaataaattttttttttacggatatctcgcatttaacatatttcataagatatttaagaacttgtgcaatttaaaaatatagtttgtgtaaaatatagataggagaaaatatgaacttgattgggtaaaatttgaataatttaaaaatgttagatggtgggtctggttgatattgttttaaacaaattcacgagccaatttcccatgtaaaccttccccatgttacatttttcttctcgtctctttttttcgaaccctactctttaataacattcattagccatttatccattagccattattactaccactactatatccgttccttttattatacagaaattcttgatacgagattatgcagttgttttagtaaatttttgacagttacgtagtagtttatcaataaaaaaaacttgggttcaccccctgagggtgaacctttatattcaccctcttaattttagctaatcaaaatttgccaactaataataaaaataatattttaatttaattgaaaaatctatttctttattaaaacaaaattatgtatcggtttgggtttattagaaaggattagggtttagatattatgattaaacaagattaaatatcggtttgggtttataaaaaaatttaaattttataattacacgaggttaaatatcggtttgggtttagaaagttcgattagggtttagattttttatgattaaacgagtttaaatggtggtttggatttacaaaaaagaattaggatttagattttgtaattaaacgggattatatatcggtttgggtttataaaaaatggttaaagattagatttaataattaaataagtttagtgggttttaataaatttaattatttatttaatattaattattttaatttagttaattagatgacatgacaaattttaattggttaattaaaagggggtgaatgaaagaagttcacccctaggggtgaacccaagtcattctctttatcaattgtgttttttaaaaacaattaaacaggttttaaacgcgtctggattgcttcaagatattaagtaaacgatttgatgctcattttatttctaaactattcactaaattccttcaattttaaattttcttaatggttacatataatgtaaaacaatttttttgttaaataaattttaaaatcattaaaaaaattaataagaatcaattatttgtaatgacaaattcaatttttttaatgtatactattttttccctaattatttctctattattcgctactatcaaaactctctaggagagcatagagaaccgttgcaacaataacttatgaacaagtagatgtggtaaagatgtagcggttgatgtgaggagccaaagagagttgctgacttagcttggtaatcaaagactaaagttggttgagaagatttgtgaatattcttctcataaaacatggaaattgcatttgatctcacacgttggacgatgagatagaaaccttgcatgggagagagctatcgtgggaagttcccttatgaaaagtcaggtgtatgtaatggagattgaatcggcgtcctttgagttttcttaccgaaacgagttggttttacaatattctgcgaaaactgttggtcacgatgctcattcctattggcatgtttagtcatccgcttgtgaatttgaaatttctgcacttaactagttactagtggtaaatgtggaagggatgatttcattataatacatagatgaatatatacacgtagcaataactagggctgctcaaatgtagtaaatcagaatattctaatggacataaatagaagcgtaatgttagcaatcagtaatatgattgtctgctctaatagtaacttattaaccacgggaataaaaacacaatgattttgatgatagaagtataataaatatacatgtcttctagcttacataataatacttcataatataaattggaaagccatatgacaataaatacagatgcatgagggtgtcgtcgccctatcatttgattgtcacaaagttatattgtatgatttaaatttgatccgaacgtgcacctaaccaatgaaattttaaaaatgcgtcattacattttttttcttaatttctttatggttttattaccttttctgttttggaaaaatatcactctatgttctatgctctatgttctatgttctatgttctatgttctatgttctatgttctatgttctatgttctatgttctatgttctatgttctatgttctatgttctatgttctatgttctatgttctatgttctatgttctatgctctatgtgatgttttggattgttttttggtattagaagatgttttgtaggtttagtgtcgattcatgatattttctaatgcagtcatatataattattatttgatttacaaccgtattgttttatataaaatgattaataaactgaaaatacttttttcatttttttcatatatgtgtaaaaaactagaattttaacttttatgcaacacattttttttgtcaaccaatataaattagaactcaaaataaccaatttcgtgggatattatttacgtatgtcacataatgcggttcggtacgaatctttcgtgctaacttttatgcaacacattgtgtataataatttcgtaatatattattattttgacacaatattaacttaaaacgtccttttaagttttaagtctaaacgaatgaagatcatttcccaactatagataagatacaatttttatttttttcttttaaaaaaacaaaacttgaatatttaatacctaccagattaatgacaaaattatagaggtgaccagacataattaagaatccacttggctcgtgattttatgagtccatcgtggatggtcttatctcagggtaataattaataatggagtcaatcatcgggaaaactacatgtggaaggtatgatgagacaacaatagcaagttaggatagtgatagattcatcatgtcgttatcattggatgttaggtctttcgtctagatgtcaacagcaacatcacgagcttttgccttcatcttttgtcaccgacatgtatcgtttaaccatgcattaagtgtttgtattgatcatgagattagcttacccatatgcttctttaataagctccacacaaaaagaacgaatgcttaaaggtgcattttccccaaaatgtatagtaaaatagtgcaaccggccatgtccctatgcaattgtagattgaagttttgatagaatgatattgagaaagtgcacaattcttacagaaataaaaattttaagttcacttttttactccgagcttagtggtagttggacctcagtcattgtgtatatttaatgtttatgggtttaaacttcactagaaacaaaaatcacatgaatattagttgggaaccagtgttggagccgtctatgttgccggatggttgtgttgtctggtctttacaaagcaatttaaataagtcgttcgtggttggaccggattatagtcatgtacccgcagttagatgccggccataatcacccaaggttatcaaaataaaaaattcaaggttaaaaactaattcacatctaaataactgatacgatatggccaatctagataggtcactcaatattctttcttttttttgtttttttttggttaacaatcatccaaaatattaattttaatcaatttagtatgagtcccaatcaagacatgcattaataaaaacaaaattagcttctagtatatgtctgaatagtaacaaaatatatatatatatatatatatatatatatatatttaaaccaaaaaaatacttaatcagcagttgaatccacgtctccattcggtagattcccaactataataacataaggaagatatgcatgcatcgattcataaaatatcacttctttgatctatgcaacacaatgaaacttgcttataaaacagatctatgcgtctaacatcatgtcgtatctgatctatatatacaaacattttttcatgataaatcttatctaagcaaatcaacagagtgaaacctgcttaatgtccatgtattatagaaaacaatgtaagaatgacaaagccggttaatacattctatacatggcttgatagcaattccattgatggtttctaaatataagtttcttaacattaaaacaacaaaaataatattatttaattatgtgggtttcttgaatggttagaaattctctccaaaatttcttatataaggtattttggagatgatttcttcactaatcaagaaacccacatattttttataataaaatttatctctctaaaataagagatttatgtttagaaaccattggtggagttgctctaacattttgcaagttttcgctaacagtttctatcatttctaggaaggtcaattttaaccctttcaatcttgtgatcataggttttataggtaagtttgtaagaaaagatataaaaatatgaaatactttaatattaaaattaatttcaacacaaaatactttcaaaatttagtttcttacacatcataaaataagaagatagatatctataataaaactaatctttttttatctattattaattacaatatcatatccatgaatcaatctgttatccatacatttttagagcagctcacgtgtactaacctacaaaatctcttttaatctaccactataaaattagatatttagttgttttgtgcgtaattacaattgtcattgtgataggaggggacatatgttatcggtcgattggtagtaggcaaccatggtaatcttcatttacaggttcttgtaaagaaaatgttgatttgcttgagtggtcctagttttcttctttggattaaagttagtttgcctactatatggtttcgatttcttccgatttcggtttaattttttttgctttgtaactttagtacttatgttttccttgcataggcctttgatcccagagaactctcgttttccttcggttttgtttccgagtactttaattttgcctattcgtttaatttttcttgtttggattgtgttgtagtttggtttttcagcaaatttcagttaaaaaattcagatgacaaaacaaaagaaagtttgtattaagaagaaaaataacaattatgtgtattggctgaaagataatactctttttgtttcttattattatttttttctatcaaatatttttcttaacaattatgtgtattggctgaaaatgttgtattattttctaatgcaacatttattaaatttcaagaaaaataattaaatactattggtttagaacaataagaaattgtaaatcacaaaaaataatacatttatacttaacttttactattttttttatttgttttaaaattttagaaaatatattattaaaaagaaatagattaataattaagttcatttttaattggttgatgttaaaaggaatcaattatggattttctatttttttggatggcatttgtggattttgcctctttttgaatagtttgtggattttatcatttttaacctacaaaaatataatttaatatgtgttttatcgtcatatttaggttagttagttgtaattgttcttaaaatttagtatttggtataaagtatatacttttaccaaacaaatccaaaatttgtatattttttaatattaaaagtggtaaaccataaaattttagtaaaaataataattttaaaaaaaaatcgacgaaatagggcaaaatcaacgaatctctgtaaacagtaaacttataggagtagaaactaaatttttattttaatatagttagaacctgcataggtcggaccctaaaaatatgttctggatttaattatttagaaagaaaaatatagaaaatgtatgtatgtcaaaaagtcttggaccataattggcggagagagaacctggggacggacaaaaaagtgacaatttgctccgacattaaagataattaatgaaatcaggtataattaaatgaacgcataaataaatgaagagagatgatgatatatgtataatcgtaaacgcatagagtagagaggacacatggagccacccttgtggtgtccgacaattacttttaataatccttccttttaatgaacttctattattttgcttagatatcatttttttttcttctatgtatgataaagttctacatttctggtttgtaatcttctaatattttgatagtagagagttggaataccataacatgttggaaatgttttccattttgaaaaccaaaacttttttttttaaaacaatttttagctatcgttatcaataagttcatcacttaaatgtttttgggaagttcacagtattttggaagatattctattaaatatcaactatttttctagttttgtgtgctaattttttcctcggttatctaatgttgtggttgattttattgcaaaactatgtctaagtttgtatggttagaacatcatttgagcaatataattaagtttgtgcaaaaaagaaagttgatcacttagtattaatttttcattatataatttgatcaagatgcttgcttaatccgatctagataataaacaaaattatctaaacagtatgaaactacaagttcctaatagttaatgttttgacatttacaaagcaactaagtaaaatgttattaatgaattggttactttttttttggtaaaaagttaaattcatatcatttttaaatttttgacagaaaatacagaaatcacagaacaaatgaaaacacgctattgaaaaattaaaaacaacaatattattcaaaaagcttttggttgctactgaatgaattggttacttgtttagattgggtaacaaaattctaaccaaaactagaatcactaatactcattctttaccaaataatacttcaaattcaaataagagtttgattgtgaaagctgtatagctgtacgtatcatgtccatattacagttgtaagccattgttacaaaactactaaaaacaaaaataaataatagaaaggtccgagaaacttgaataaaaatttagaatttttaaaacattattatcgtaaataaaaagagaacctcccaagaaacaagtcgtccttatataaagccaaccacacccctttagcttctctcaccatcatcatcatcatcatcatcatcatttctctctatctctttctaaaacacaaccatgactgtttcttcatctccatgggctctcatggctctctttctaatggtttcttcaacaatggtaatggctattcctccacgcaaggccattgatgtaccatttggtcgtaactacgtcccaacttgggcttttgaccaccagaaacagttcaatggcggttccgaacttcagcttatcctcgacaaatacactggtacaattactattaccaaatctctgcctaatgatcacaatgcaagttttgatattcccattttttatttggtatataggctaaagcttaatttttaaaggttaaattttcttgagtttaaaactacatttcatttacagattaagtaattagcattaatcatctctattattttacaactcaatatatttaaattttatttaggctttgttttgtaaaaatatatttagatttaacatggtcctactagtgataattatttttaagggctaaattttcttgagtttaaaactacatttcatttcacagattaagtaaatagcattagtcatatctattattttacaaatcaatttatttaggatttgttttgtaaaaatgtataaaacaccttacttttatctttcattaggccccaagatcttaggtacactcactcactaactatgttacatgtgtataaaaacaggcacaggatttcaatcaaaggggtcatatttgtttggacattttagtatgcacataaagcttccagctggtgacacagccggagttgtcacagctttctatgtaagtctctctcactagtcactaataatacttagatcaaatttaaatgattaacaatatttattacaaataaattgtgtgaagctatcatctaccaacaatgagcatgacgagatagactttgagttccttggaaacagaacaggacaaccagctatattacagacaaatgtattcacaggaggaaagggaaacagagaacaacgaatctatctctggtttgatccttctaaggcttatcacacttactcaatcctttggaacatgtaccagatcgtgtatgaataattctatccttcacacttacttacattacactttttcgtatattattatatagtgaaaagttgtcagaattaacatggtcctactagtgataattattgtttttttttcatattcggtgcagtttcaaattattagtattatttttcttaaccttggggtggccaaaaatcttgatcttatcaaaagtagtggggtcttgtaagattatcttagacagagactcttgagtcaaaaagttgtagactttttcagcttttagattttctaaatgttcaaataagctagactacgtggataggtaacataagtgactcactcattagtctttattgtggggtattcaaaatttaactaaactctaagagtcatgtgttgtaaaccggtgtggtttactaaaaattgatttttctttgatcagattctttgttgacaacataccaatccgaacgttcaagaatgctaaggatctaggagtacgtttcccattcaaccaaccaatgaagctttactcaagcctttggaacgcggatgattgggccacgagaggcggtttagagaagaccaattgggccaatgcacctttcgttgcatcttacaaaggattccacatagatggttgccaagcttctgtggaagccaagtactgtgccacacaaggccgcatgtggtgggatcagaaagagttccgtgaccttgacgctgaacaatggcgtcgtctcaaatgggttcgtatgaagtggaccatctacaactactgtaccgaccggactaggttcccggttatgccagctgaatgtaaaagggacagagacgcataagttactactcttgagggttttaatgaatttatgctatcattattatttgaattatgcttgttcaagagattgatatatgtattgtttgttggcccatgatgtttatgctatatttgggcctaaaattacatgttataattcatatatgtattgattagctatgtattttcatatgttatgatctacttacaagttttattctttaacgtggtaaaagtgcatttggtattaactaacataaacgtgattattattaactattattgagcggccgctttttctctaatttctatgtaagacacatgaacagaagaaactagtcccttcctcacatgcctgctttgcgagactgtttaaaatttacacattttaaaactataaattattgagaaatatcattctatatggatagaaaacttgttatttaggtcttttcaaaatccattgttaccctaacactgttaacataactttttacgcatgtatccttacgttattgtttttgtcagttgtaaagtatacgcgaattattgcatgttgtaggattctaagattgtagtggaatattgcgttcgggagttttttttttttttttttatgttttcttctctcctactaacgaacattcgtgtgctttcattactatataaaggagagagattgcgattgaggcagaagaacataaccctcgtcttaaaattttcttgtgttatcagggttgattgtcaatcgatatcatttccttccgattagagggttcttcattcgttttgggtaattgattttagtctcctctctttgattttgtttcttcatttgttttatctcgctgtgtcttattagggtttttcactttgtgtagacgatggcttcgattccacttcctccccggttaatagctctcggcgaagaacctcgtggtgaaagggttaatgtttaccagaagataaaaaccctctgcggtatattcaacgctctcgatgacgatgaacggcaatacctttctcggtctcctttcgctagactgttggagttccccaacaatcctgcttggtctgctagttttgggatttttattttgggtaggcagttggaggtgactaagcctaacgagatttgggtactattcgcgggtacacctattcggttttctctgagggagttcaagatcgtcactggattgccctgcggtaggtatccgagtttgaagatgaagaagaaaaaaggcactgcgggaaagacgattcctttctacagtaagttgtttggccttgaggaggagggttgtttcagatcatggtatgaggatcagatgtgcttgcttagccattgttgatgggtttcttgtccctacatctcaccatcccaagattattaagtcccacgccgaaatggttgaagatgtggatgcctttcttgcttatccttgggggcgttacacgtttgagatgatgattaagtcgataaaagagagggaaatcgaacaattggcaagtacgtgttttgttgttcagggtttgttatgctttgtaattggtcgttttacaagtcgctccagccattcaagatggtcttgttatcgacaaccctattgattccgagtctgaaggtgccgaagacgatgttgaagtggccacccgagagtctgtccctttcaagaacgacatgtttgacggtgcatgtttcccatcccagatccaattggcatctaaaaagcaaaagcgtgggcctaagtctaatgctactcggaataggaaagcagccaaaacatctaagaaccatggtggggtttggtccaaacctcaaagagacaaacctgaggaggttgggagttctgaggctgtttctatggacgctatttcccgtatgctggatgcgaagcttgaagctcattcgaaaaacaatcatttcggcggtgactgattggtttacgaaaaacactataattgaaggtgatcactcgaaggattctgacagtggggtaaatcacccgaaagagactgctcctgctggtaatgttggtgcatcaaatactagtgatttggggtctaatgcaactaatgatgaatttggttttaattctctccgaacctattcacgttctcattgccctgaaagaacttctaatattgaggtaagtgtggatgaaattttatctttctataattataaggtctcaagtagtgctggttacaaggaggcggaggtaatatctcgttctctaatctgttaaggttcctgctggttgattaattttttccttatttccttcttttctgtcgcggtgtagcctgaagaagttattcctatggatgaagatattcgatctttgggcgacggtgtccatgattcccaagtgatatatttccgaaaaatacggctcagcgtagctaaccatcatagtattcttattcctgtaagttagttgtcaaggactacatgttttgtttcgggttaacaaataatttcggtaatggatttgttagggtgataacaatgtagcgtccgatgctattccaccaccacaggctgtctccgaagataacaccgaggttagcatatattttgattatgggataacaattatcatactgattcaacattgtatcctgattagtttagtttaaacaagttgatacaactcgtatacatgtgtcactaatatacctttctgcgtttttttcgtgttaacaaataatttctgtaattggattgttagggtgataacaatttatcgattggttaacgcacaggttagcagatagtttgattatgggttaacaaatatcataatgtgtcaaattttttctccatttgtcacgattttttgtaattgttgtaattgtcggtaggtctctaacggcgacaccgtcaaggacgacctctcccctagacgggatgttaatgtggaagcggatgttaacgaggttagattattaatcaaatattggtttctatttttttctcctccagatctggtgagttttgtcatcgttgtgttagcgttgtttgtaactttttgttttttatttatttaaagtggcctaatattagctctgtaactggagcagtcacttctcccaaactttcgggcgataatgaggaggttagctgttatccatattatcaaaatcattatacttttatcgtagtaagttagttgtgttaccgttacatgtttggagtataattttaagtgcctttcaaaatgataattccaggtccagtgttctcagcagacaacaaccaatgtggataccttggcaaatgaagtagaggttagcgaggtattgtatctatttttcctagccagattctccatattggtagtttcaaataatcttttttcttttttaatttaagcggcctgagaatacaccagccaatctagcagtttcatctcctaatcatttggttgataatgaagaggttagcagttattcgttagcggaataattgtcatcttattgatataacttagttgttaactgtttcttgttctagtttcagtgctcctagcaggcagcacacgatgtggaccccttggataatgaatgcaaagaaagctagggattagatccctttatattatcctagtcaggttgactagttttcaaatttttttttgtatatttgacctcattctattgaatttttgttatgtagggtgtccctatggttggcgtcgattatgttagcaacgagacgtctgcggagttaccagatatagtggttagcagctaaattaccatcaatatttgatatcttgtctttagaacttgtttccaaatcaacttctctttctgtaaggataaatgtttggcgtgataacttattaggtcctaaattaccatcgggttttttagtttgttttcaaccttttttttttgttctttaaaatattagtcctaatatcttttgaagactaaaataaaatattgattattgatctcttcacactaaccggcctaaattaagtaataagtttatcgtactaactgattggcctaaaaaaaaaactttatcgcactaactatactattaaagtcaatcaattattacattgttttgatatgactaccctttgtctccaatacaatctttgtcgttgtcttttggagtgaagtttaattagtggttattaagaatgtccataatagttttcaagcggaccatcttttatctcggatgtgttcatcttgtcttatacaaaactctaattaggtccctatccatgatggtgtgtcgggcgatctgccagtaaccactgtcccggttagtttgataacattattagtatcagatataactaattcatcattcgttgccaattcgataacttttgctcttgttttggttttaataggcttttggcaggggtgccccttctgctgtttcatctccccgccaggttttttttttttttttttcttgtctgctaatcatattgttactgagttaaatttctctcatgtaaattttcaatttgtaatcgttcgtccatgcgccgtggttggtttgcgcaggattcagatgaggtatttcgtagtggttgcgctgttaattctttggtgatcgattagttttttttattaatgttttccatttcaggatttcacaactccacccccttctaaaaaagcgatggcccccctccaggcatttaaattttttttttttactttagctcatggagctctgtttttatattttacattttaactacttggcaaacagaattatggaaatgttgataatgtcgagggtatgcgtggaagaagaagtaaaaggctccgtactctctctctagcaagttagatggtcggttccagtacgacaagaaaacgaaattgttagttgggcatccatcccctgttattaatcaggtcaacgtcgaccctgaggagcgattccaaaactcactgaagaaactcaaggcgataaggttgttttatcctgttttctaattgtttagtcaatacatattttgttatttttaattatttccaggggtaatctttcagcttgttttctctatagttctattagcatttgtggtgggattgctctatctaataaagacattttggacttaattgaccgcaagaaaaatctgacttccaaggtattatgtctgcgatatatatgcgcatttaattttaaattgtttttctcatttacttaattttttcgtgttttactcgtgcccacaggtaatggatgctctcataagatttagtcgtcatctgttgcgtactgatgatgtggacggcgaaaaacttcgtctcgaagttcttgattcgaaatttgtttcattgctctgccggcatttcacgaagttttcctgatgtaactcaaaaacagagttccagttccctttacctctaattgatattctctccgcgttggcgaatctgaccgtgtgcagttattcacggaggctcattacatatatcagccttttaacttcgacaaaaaacactgggttgctttagctgttgctctaaaatgccggaaaatcattgttttggattcgaatatccaacgccgcaaggattctgccattcatgatgagcttatgcctctcgcagtaatgctgccatatgtaacgaccgcgtcccgcgttcataaagaggccggttagttttaggagaaaactagatcatggtcgaggaacggaccaaaatactaagtagtaagaacgagaaagttcaagctaaaccagctaggtgagctggacaagctagatgaactagctagctaagctatgtgagctaaaccagctggaagactagctagctcagctaggtgagctgaccgacagctcgactgagctcggtgagctgatcgagtactgacccagttgggtggttcggtcagctgacactcgagctggtggactatggtagctcacgggtgaagaggtgtctcggccagaaggtataaggtcgagcgggtaccaacgaacggttgtatcgcccaaaggatgcaaggaacggatgtgacctttcagaaggatgcaaggaacggatgtgacctttcagaagcaaggaccggatgtgatgcttcaggaagcatccattcgccccctatataagggaggacgcccaaggcctttgggatcatctcacaacaacatccatacaccacaaatcattcttaaaagagtcccaacacatcccgaagttgttggtcggaaaggggatgcggctcgaagagtataactcgaccgaactgatgcgcatgctacctcccaatccaacggttcgatggagtgtagaggatggagagggtagaccgttcgtcttagagactaatcggatctggtagaccgattgtcagatcggatcggccagaccgatcgtcggacggatcggatcggccagacggattggaccggacaaaccgatcatcggacggatcgggtgggacaagccgatcgtcagacggaacgggttagacagactgatcgtcgggtgggatggatcgggaaaagtgttcgaggaagcacaaggataagtgcatccgaacacacccaagggtcgcccatggatgcaatcttaccggtaaagggagaaagcaccaagaatgggtaaggaacgtgattcaccatataggatcaatatcgcggccgccttcatgtatctatctcctcagccatggtgaaaccgatcggagatcggtaagaccaaagggtgactcgacggataaccaacaggaaagtccacggtgggaaccgatggacaaaacggatgttggacccgcgagcgaacctaaggccgacggaagaaggatttcatgggctagcctacgatgctccggtggatgaatccacagacccttaggtgtgaaaagaatatcgttcggatcgtatggatggattgataagctgagagctttaccgaccaccatggaccggatggctaaatggttagtaaaccatgggcggtcatagcattaaacgaccggatcggaaacatggatggttcgataaggcgagggctcaatcgtccaccatggaaccaaaggggcgtacgtttggaagacggatggaccaatgaaccaagagcttgattcggccatcgtgaaccaagcgaatcgtacgatccccaatctctatcgtagtacttagaccagtggggttggttggttgtagggctaagtaacgatagggattggttcatcaattcacgactggatacgagtcgttgaacgaatggaataaggcgacaaacgggctaaggaatcaaatccgcatattggccaaggtatgtaacgatctagtttattagttaagatagacgtttggtaaatggccgtgaaaataggataaaggaatatgcgattgtttggcttagaatggttagcgaacttatgcatgtcttgaccgagtaaaggatcgatctaagtctaagggacaaggacgatgaaaccggtacaagagttggttagaactaaaccaaggttagaaagacttccgctgtgtaataagaaagtgattatagaatttagcctcgtaaaggcaattctatgttgaatcgcgaaaaattaagaggttcggccaggaagaggcgcgaacttgagtccaacgtcgccggacgccgagacgtctgggacggggtctcacaccatatcttttcaaacaagcagccttcaatcctcttatgagtcaatttcttccggatccatttactatagagcgcccttctgtcattccacaggtaacttcgcctcttgacacatgcatattctctatatttctcatacacacgcatgctaccaggggtgtacctgaatgtgtggattttgatgttggcggcctacaaagtgaagtgaagaagctagtgtcagctttaatcctagctgacggttactagataaccgctgtgttaacgaatattttttacatgtgtgtttatgttctcgcctcgaatcatgcatcttaaactctttgttgggactaactatgataatctccgaacgctttcgctacatttgtcttgtaatcatagtttctgaaatgtttgtatggttatcaattgtttatcttgctaacaactgtacgtggatacagtttagctggctattagcaagattatcacgatttatttcattaccggttgctgagtatgattttttaaatattttattgggagtgtacggaaagagggagttgtcacgagttttatctggtaacgatcgtagcagataaaagaatatcctaaaactaacggcagctgggccatgcttagtctattaatttagctgtcaacgtatcaatcttatcaaattaacaatattagcatatatatcgtttgtaatggatggttgctgacaagccattctgctttcacgactaagctggataactattaatttagctgtcaacctaacaatcttatcaaattaacaatattagcatatatatcgtttgtaatggatcgtcgctgagacgccattctgctctattttattaggcgtgtacgaaagatggagttggcatgagttttatctggtaacgattgtagcggataaaataatatcctaaaattaacggcagctgggccattcttagtctaactattagtttagctgtcaacgtaacaatcttatcaaattaacaatattagcatatatatcgtttgtaatggatggtcgctgacaagccattctgctttcacgactaaactggataactattaatttagctgtcaacctaagaatcttagcaaattaacaatattagcatatatatcatttgtaatggatcgtcgctgagacgccaatttgctctattttattaggcgtgtacggaaagatggagttggcatgagtttatctggtaacgatcgtagcgggtaaaagaatatcctaaaactaacggcagctgggccatgcttaggctaactattaatttagctgtcaacgtaacaatcttatcaaattaacaatattagcatatatatcgtttgtaatggatcgtcgctgacaagccattctgctttcacgactaatatggataactgttcagcttgttaggtatatcctaactatttatttagttggcatcataaacatcatattgaggtaacaatattagcatcttgatcgcttatactgtttatcttgttagaaaatatagagattaaccaggttaacaggatctatcaaattatctgtttatgttcctattttataaaatttatctttttgcaattcgtacgttcctaacaatattagcggataactagtctattatgtttatcatatattcgggtgttctgaattgtatttaaatattagattttcgtgtaaacaccaatagcagataactatgctattattgttttatcttactatgtatttgaagattaggttatccttatgtttaaccccaatgtcaatttcttttcctaataacttagtgtttaaccgcatatcataactatttagcattgagtcatcgaatatctaggaattaggggctactactttgtttatcagaatatctgtttggatcgataaaatatgatattataatttaacatttctacttgaaaagtggatgggttcgataatattacatttagcgatcagtagccatacgtatacacatttaaaatttctgatcgcttaaggttccttatttatacacatctccagggcatttcttgttaatcatggcagcatccatcactttccgcgccaaaaaacgtccttgaaccatattttctacggtccctgcactcaaaacagataatataaatatttcataatatagtcattaacagataatatttgacataccgatattggtccattgcaggttggcctgttatgtcccaatgacttgcatcgtgagcatctttttcttgatgctcgctacaaatggaagcgaaggttacatcctaataatattaccatataaatattttattagctttgatgtcaaatattttaccttgaattctccttttgagaataatctccgtttccttggtcgcccaggcggtcggcgcacatacggtggagctaattttccaccacctacatcatttggtgaaggagtcagcgtttctgtgtcgggtaccagcattatgagtgcttggtatgaaaatctaagctggggtgtcgtgtgatggactctaaccatcgtgttcatgcggagcccttcttctatagccgccgatatggcatgtgagcaggggatagttaggagctggaactccctgtacacgttctctcccataggttaactgcaaatgctgagcctctcttttctataacctcatatagcccatccccaatctttagcacaacacatccagctcctttctcgtaattctcgatcaccatatcgtgcaccttaggcggtaagatattatcctcagttctggcagcttgcctcctaagcgcaaaccatgttacgagtgtagtgcgaattgactctaatatagaattaccgggtaatctcgagcgttaacacattgtttagcgactccgcaatattacttgtcatgacgttatacctattcccaacaaatagggaccttgtccaatgctcgaacccgataccttccaagtagtctgcgcacggtccatgcttagctcgaacttcagcaaatatcctattgaagtcagttagtcgataagctctagctgcactggataccaaagtacctagctgttcatatttaaaggacgcctcaatgttccttttcagatgtacgacgcaagcagcatgagatgacatggggtaaacctgcataatatttaggcaggatgtgattttttagaaaacatggtatattagtgactaacttaattagtatgagatacattatgtgttaccatgttaccttacggatgctggcgtaaactgagttgtgtctatcagacacaaacaccaactccggatcatctggtatcgcttctgtcaacttagtcatgaaccatgtccacgcctcatcgttttcgctgtttactatccgaaatgcaatggggaagacctggaaatttgcgtcttgtgcactagctgcaactaagtatccgccatatcgtcctcgtaagtgagtcccatcaattacaatgactttcctcatgtaagcatacccttgaacacatgcatcatgtctctaaaagacgcttgaagtaaggttggattagggcgtaacttcccatggcagaccctaaagcattgtccatggcaatttcccgtgcccgccatgatttccaataggaaacgttgaggcttaactcttggcgtagcattcttctcagctcattggcgcgaggcccccggcctactccaatatacttagtacgcatcaacttgccaataactgtcgtcgacgcatgcttgtggaagtctcctcttgcatccacgctacatgtatgagtttgggtggtgctcctgacctcgaaccggtcgctatctggcagcttagtagcataaacccaccatggacatgtgttgctgacgcagacagccgccacgacgttcggtcctgatttcgtgtagatgaaatggaacttccggtgaattgcttggattcctagtttcgttgcgcagtcctctttgcttttaaaaatccgaccaatgtagatatcatctccctcataatcagcatcttttaggggacgataagagcatctgcgaggaagagaaaacatagctgttaatacttttagcgaagatgtttagttatcgagttaaacaattacctatcgaacataattagctatatataatacagggctaaatagttttttttatatcaaaattgctatataggtatgctttaccttcttcccctgggtcgtcaaaatatggtggggcatctctatcgtacaacaccgtcggaaccggtgtatctttcaccatcaactcattcctcattacctccgatactcttgtattggctgaacccgtacctatctccttagtggttattccttcgcctatcatgataccttttcctttctccgttattccgacgggttgtggggccataatgagtgggccatcaggttcagaataaaagtgtgacagtgtttcgccacctacagtcaaaagtcagaaaccgtaaacgaatggtaatagtattatgttagtgttgacgataacatattaaatatcagataaccaacctatgcgtgattagctgttgttgttggatgagtcagtgacgtccattaggtcatcgctagagaaagatacgcttgtggaaagcgaggttggcgttccaaaggttgaattgcttgatgacagtgccaccacttgggtgcaaacttcttgtgtttatgctcttgctagagtgagttgcaagtcctaacgtggattgcccttggaaatgtccgccacttccgtgcccgccacttccgaagttaagagctctagcagttttaccagtgtcgcccacgtttgttgcgtcaatttgagttgctcctagggtcatttgtgttgcacacatctctcgccatatttcttcctgttgttgagttcgccacatctcaaacaaacgatctcgttctctctcatcatcatcagtaactttctcttttcctttagagattggaatggagtctggttgtgtgtctattagtggcacaccgcttgtcccagctgtaatctcgacgttgtctcttatgataaaccccccataagcgtttcgttggtcattgcccttctgtacgcccatgctgttgtcctttcccatggctgccagtcccatggctgccagtccatcaccgtcacctagataagatatatgataccaaataaataagttatcggactaagtatatgatctgtaaatcaaccctgatataagcaaagttatccaatttatatattaacagataaatttactacaatatagcaaacaacataggttttggttttcacctgatatgttccgtagcaacattcttgttaacgcggtaccccaaacagctttgtttccgcgctattccagtacttatccaaaatttcttccgaagtaagaccgcctatatccaggttactccgataactattaacgtttcgaccattcccttctcgtagtatcttcacccgtagatgcacttcatctagatctgcccgtattgccataaacagtgtcatatcctcatcgtccaatatatcgatcgggttagcgcgtctccagtcaggatccatcatccactgtggccattgatatgttaactcgatatcgtcttcggcacccagcgctaacttttccttttcgccataacaactttcgcaaacccatcctgctctcgcaatcggactcctaacgcaaatccatcggcatgcaaaacgtgttcgaaatagccgttctcatcttttttccattccccaggtactagtctgaccacgaactccatttacacctgcttggccaatatccgcagtaacaaacttgttagtatccgtttgtttcaatttatatgaaaccctaaagtaaaaatcactcttacggaacttaacaataatatacgtatgactcagagattttacttttacctttcagtctcgaattctctgggtgtttagctcctttcgcattaattttgtcggagactaaggtctttagtctgatagttttttttttgatgcaaggaagagagtatactgctaataaatacaccaacgtgtataagtgatatctcgcaaccccataaatatccgacatgatgatgaatatattttttgtttccaaggttagctgagaaaatcttcggttatatcttgggcattaaatgtagccgcgtttactctctaaagtgttatcagaggctacgctattttgatttggtaggggtaatttcggcagaatcgtttgtcgcagaggagtgagattttatttctgagtttttatgcatagttccttaatttaccaatcttctaagcataggaattaatataaccctaaattattattctgtttgattgtatacagcactataactgttttagcataaataaaaatcggtaagcaacataagaataattaaaaataatattctctgttttaatgaagtttgatattttgagttttattttttttcacaaatattaatattttagatcaatattattcttatttttattattcaattaacaaaaaattaatagaaaactaaaaaaaaaaatcttaattttgtaagaaaaatccaaaacatcattcttaggaacataaattgtataaaatacacataagaaaaagaatacaaaaattgaaataataatttaataacgttttgatatttttattattagtaaatactaaaactgtaaaatctatatagtcttttgtgttttggtattttgctcgtttgaagtgttattgtttgcttctaattattttgggtttggaaaaaatctaagaaaaatgctatctatttgtcccgtttaatatatgtagttttaaaattgagaaaaataatattgattaattgagttttttttttttttgttgttgtaaatttgtgcctctacgtgaacaaagataacaaaattattaattgcagttaaacttatcctataatgtgtacatattatatatatataatacctttctaaatctagatgaagttaagttcacttctccatgggcacaaggcaatcggcttaaagtggatgtacaaagcaaaagaaaattctaaaaaagaagtgaagcaaaacaaaacatgattgttggcaaaaagtttatagccaaagagttgaaatcgattatgacgaggtatttgctaacgctgttcttcttgaaacgattagactaatatttcataagcgtatcaaaacaagtggtagatacatcagatgatgtcaagtcgcctttattaaatggagaccttgaagaagaagtttacattgaacaaccacaaggcaacatattcaaaggagatgaagacaaagtcttgaggccaacgaaggcgctttatcaaataagtttcaagagcttgaaatactcaaattgagaagtacttcaaggaaaatactacataaagtgttcatatgagcatgcattctataccaaattccaaaatatgataaatttatcgcatgcttatatgtagatgacttgatatcactattaataactaaagcatgttcgaagaattcaagaaagagatgagtatgagatacggatattggattgatgtcttactagtttggaattgaagtaaaaaaaagaagataatggaatctccatctcaagaaggctatgctaaggaggtacttaaaaagtttaaaatggatgactcaaatccggtgagcacaccaatagaatgcggaataaaattatccaagaacgaagaaggataatgcgtggatccaacaacctttaaaagcttggttggaagcttgagatacttaacatgtacgaggcccaatattttatatgcggacggattttttaaacgttacatggagccaacatgagctcatttcaaggcggcaaagaggattctttactatatcaaaagtaccataaacctttgcttgcactattgtacttctaatgattacaagcttgttggatatagcggtagcgattggattggaggcgtcgatcaccataaaagtacaagtggcttcctgttctacattggagatcggctttcacatgatgtcgaagaagtaaccaaattttgttactctatccacttcatgtgtgtgccatgttaagtttgccacaagatgaaccaacaaaaatctatgtggagaagaagtgaccaataactttggcaaagaaccccaccttccatgatcaaagtaagcacattgacacatgttattattacattagagagtgtgttaacaagaaagatgtgcaagaaattggagtatgtgaagagacatgatcaagtagcccatattttcactaagcctcttgaacgagaagactatcaagatgaggagtttggttgttgtaataaaataaaatttaagaggacatgttgaaagttaaacttgattttgaatgatttttaattaattggatcaattatccaataatttgatggaccaaatctaaattctaaagttttctctacaaatatcaatatttccacttccttaacaaaatgtagagattttctagaatcatcttccacctccttaaacatagaaaatctagataattttataagaataatctagataactttctaggattaaaatatttgagatatttggtagtttgaaagctataaatacctcactcctcttttatttgtgtagttgttttgaagttttcttcaagttaaaatcaaagcaataaaagttatgtttcctaaaactttctctcttaatacttaaacactttctccattacttctaaaaaatttcactttaacattttttaatatatagactagcaaactttgattttctagctttctttcaccattcatgtcacctcctcaaagttaaaggtattagtcactcaggctacaagatatcctctttggaaggaacaaaacttgatagaacagttcatgacttttttttagctcatagattgtggaatatactcctagatatgatcctatcaagaatacaaaacttctatgtatattaaccttcttcgatgaaataaacatactttatattatatgcaattctgtttcatggtattagagcatacgattctgacctaatttgttttcttcttcttcataactgtcattacatacctcgtgaccactgctattatatactctacaaacaattaaaacttctataatctatattgggagaagatgtcgtcaccatcattgcagcaaaacaacttgcccttgctattactacaacaccttcaaacccatactcacttagatcttctgataatcctggatccttgatctcttccctcgtgttgaaggaagaaaattatccagaatttatattattccatcacccgtgacgtaatcggatggcacagcctcacaaaccaccaaacgtggcactctccctctaagctctacccataaacttcgctacgtcttatttttcctagattcttattgcactttgatctttgtctcctaattacttaaatagatagattccattgcaatctaacatgacacactctgtttcttacaagactatattttgagaactttgattgaggccagggaagaacgtgaaggagtgtactactatacgggtgttttggctgctcaagttcacaaagcctcgtctgatcatgcatcgtatagagccttgtggcattgtagattaggccatccttgtagtatagtgttttatcttctttatgagaatgtcatcaatcttcacaagatgtttgcaaacttaatagttgtgtatttattttgggctaaacaaagacgagaggtttttcctattattattaacaaaagtttggaatatttttctttagtccattgccatgttttggtccatatagaattccaaccacgaggggggggggaggtggctctctcgttcaatatagacatatctcatgcagccaaatctgaagtttctcaaataatacgaaatttttgtggcatgatccaacaccaatttggtaagctggtagtgtcaatctgtatgacaacgacacaaagttcatgtgtcttacctcctactttagagaacatgggattctccatcaaactttttcgattaatactccacaacaaaatggacgattttaacggaaacacgatcatatcttgagtgtagcccacatctgtctatttcaagggaatcttcccattacattttagttaaagagcatactaaaagcgacacatcgcattaatcgaaatccatctttagtactaaagggataaagatcttatgaaatctagtttggcaaacaccttcatacgttatgctgcgtacatttggatgtttgtgctatgctcatatcccatcacgtgataaagttaaatttgcatctcacagtcgcaaatgcgtgtttcttggttatccttatggtaaaaaagtttggcgggtatatgatcttgaaactgacaagatttttatgacgcaatgttcgatttcaagaggatttctctccctttgcttgccatccatcaagcctattatcttttgtttgcaattgaatctcaatttcatttagatgatgacgattgttttatgtttgtgattattgttctggtttccattgatttatcatctttggaagttacacctacttactatagatattgtttcttggtctatcagatcgattgatctcataccagaaacgatcgatccttctactccctcaacgatacctgtaagcacaagatcgatcaattccacaacatgaatgattgatatatatctctacctcgacaacattacttgcaagttttggaccggtcgatcagttctctaaaccgatcgatccatcaaaaacaccgatccctcaatatgttggccaggtcaaatccgcctcttcgggtcttcctgaactattggacaaaggtctgagaaagaaaatgttgttaatattacttaaagattatattatccctccaagacattcttcttctcacggtctatctcttacttttcccaactcaacttcctcaactttggtttatggtaaggtcctatatctcctttcaaattatttaatagattgtggatttgtagtagaccacatagcatttttggtggatgttcttgatagcaaggaacccaaactttttaaggatgcaattctttattaaaaatgatgtgaagctatgtaaaaagaaattgatgcttttgaagcaaatcatacttgagatattatagagttaccacatgggacaaagtgatcagtagcaaatgggtttataaactcaaattcaaatcggacagttcacttaagcttcacaaggctcgtctagtggttatggaaaatcatcaaaaggagggtattgattttaaagaaacttttgctccactcgcaaagttgacaacaatttattctcttttagtgttgctgctgataaagattggaggtccctcagatggatgttcacaattcttttctacatggtaatcttgaaaaagaggtctacatgaagatgtcatcatgttttaaatgtttggatctatctaaaacatttgtcggttacataattctctatatagcctcaaacaagctacccgttgttggttcgccaagttatcaactacactctgtcacatttgtttcactcagagttatgaaactttctcattgttcactctcaagaatgggaatacgatttttcgtattctaatctacgtcgacgatttcattatcacctgaaacacccatcaatcgattcaaacaacaacttcatcaatgttttcacatgaaggatttaggaaagttgaaatactttctaggcattgatgtgtctcttggccggaatggtttcgacctttctcaactatcatatgctctagacattattaatgacgtgggtttgatctgttgtaagccatctgttgtaccaatggaactcaatgaaaagcttgttttggtagcaagtctgtcatttcacgatccccatcaatattgatggctcgttggtcgttttatctacctcaccatcactcgagcatatctttgctacggtctcccaatttatgcaattaccgcttgttgctcattgaggcggcactcagtcttgtttgttatctcaagggtacaccatctcaaggtattcttctttgttcaaatagtcaattatctcttatggcgtactgtgactgtcattatggggcgtggccgcttacacagtgttctctctacctctattatttatcgttgggattcttcacattcatggaaaacaaagaagtagaaaactgtattttcttcttccgctgaggctgagtatcgtgccatggcttatacattcaaagagattaaatggttgaaaggtcttataacgacacttggagttgatcaccctgctcatattcctctattttgcgatagtcaatcagccattcacatatcgactaatcccgtcttccaagagcggactaaacacattgagaaggattgtcatcaagtgcgtgacactgttcaagataaactcatttttagtaaacatatttccactactgaccaagtcgcggacctcttcaccaaagctttgttcttccaccttgacgtttgagtacctactatccatgttggacatccacaattacgaattgccaacgcgtgaaggggatatgaatgtttagtggtgttctatacatttctatttcacactcgtagcttcctaaatcttattggtgttctcctcatgtttagtgtcttaatggttttttttgtgcatgttagtgtttatttacctaatcatttatatttacataaacatttgtatttcagaaactacccctctacttgtgtaaattacattagccccttgttacgtctatgacgattagaaaaacacctattgatataagagaaatatcttttgcttcacgcaccgcttggaaaaatatataaagacatcatgatgtaaaaaagagagcaagagagagaagaacaatataggagagacagtagacagagagagattcactacaaaaaaatgtccattgatagcaagacgtcatagcacggttgactgaactgctattgaagattagatgtatttttagtattcatatgatagcatttaaatgacgctaataaacattgattaaaataatattatttatcctacgctatggatatgttttcattaagcgggaaagtaaaatagtttttttccgcctaacacttaacaaaatgatgaatttccccaatttgtcgattagagttattattttctcaaatttctcaagaaccttaagaactagccatctctgctcaacctctctcaatccgacaattcgtcgccgattaatcttgataataggcttttagtcaattaatcctaaagcactatcatgtcgttgtagtactgaaggttgtcaatccaaatgggtgtgatgctagcaatcaagatgcaatcagagttcacaaagttaagctaagcaatagtaggttttggggtgttctagcagtcctaagtgaacatgcaagaaacataaattcaagcagaacagtaaaaacactcgaccaacacagcttgctgccaagcactgggtgtggtcgagtgacaggtcgagtaacagacagaaaatgtaacaaggatactcgactgcacagtttattgccagacaactgggtggtcgagtatcaagtcgagtaacaggagagaaatgtaaaaacgaagcaacatgtaacaagatgcagtaaacaacagcaaagcaaacaaagtaatcaattaggtaaagaattcccgaggatggggtaattgagtagtttcgtttcctcagtttacaagtaattgatatgctcaataaattatctctagacaacaagttcgataaccaaatctaagtgccaccgcaacagagaccctcaagttaaaccagtcctagactcaatcaccattgacgagagctaacctaacaggcattacgaatcaacaagttaaagccaaaacgctccctgcaaccaataccttggtatagagccacaaatctctggaattagtggttcagacatttcatcgaacatcttttgggtgcagaaatgtctgggctcaaattctataaatcaaactcaaccacctagcatactgagaattctaaactactctaacccatccttagaaacctagtcactactcagacatcatagtagaaagcataaacgatgaataaaatgaaaacatgacaacaacagagtaatagcaagatgataacaggaagaacaacttagtaaacgaaatcaaaagcaaatactgaatactgaatagattaagagaaatccagattacaaaaacgtcaagaacacagtgactacgaaataaaacttagataaacgaaaatgtaaaatacatgctacttatagcaaaatattccgaaaccctaatactcaaagcaacgcagtattgggacggattaggaacggtactcgacctaggtggtcgagtgaatgtgatggagttcctcgaccaggtggtcgagtggtgtgatcgagtgagggtcaggtggtggaggtgatgatactcgaccagggggttgagtgatatgatcgagtgaccctcatggttgtactcgaccagggggtcgagtggtgacgtgaagtgatgaggtcttctactcgaccagggggtcgagtggtctattgaggttgtgaaggatctactcgaccaaagggtcgagtggtttgatatgatcaggtccgcttcttccaattagctcgtcaacagctccaaatcacctgaaaacaacacatatatgcaacatgcatgcaaaactatcctaaacatgcaaagtgatgacaaatgatgagaaatggtataaaacagttttgatatgaagaaatagtgataacaaatggatgctcaaaacatgtaaaatgcacacttattaaatctcccctccgccgtcctttactgttgccacgagactaaacctaccgccggtcctaattttggctatctctgtccgagttgagctctaatcgaaggcatgtgtctctgaatctacaaatttgtttctaactttaatctggcttgttttcttttaaattttgtgaatgtcgacagtaatgttgtttgattttggtttcttaaagtctgaatttgggattttcactgattcgaatcggcaaagttttttttttttgcatgtcattgttcttcgcgaatttagatctatttgtttgtgtgatttgctttaggcgtggctatcagtacaaatttgctttcaagatgatttgtttggtttgttatctgaaatttacgaaacaaagaaaaatactgttttatttattgtcggacacaattggatggtttaggaacttctaactgtttcttcgagaattcatatctatttgtttgtgtggtttgctctcaatacaaatttgctttcaagattaagatttgtttgggttgttgtccgaaatctgcgaaacaaattagatctatttgtttgtgtggtttgctctaactgtttgtattgagcatttttggagtctttatatcttgtcaatgctcggacattcttgcaaaaccaaatacatgaaacatgataaactaattctttaattttgttttgcaaattttgttgtttgaaataatgggaatttggagctgatcttagtaacttatcacacgaaaggttagtaccatctttattccacaatattgaacattactgtgggttttgtctgcttagtattatttatttctatttgatgtgtgagaattatggtgagttgtgtttgataaagttcattgatctgttctcatatcaatttatgtaggtcatttatattgaattaatatatgagtttgtgttatataatttgctaattggtatgaatataaactccaattttatgtgtaaagagtattttgttaaaatttgaaatatttttaatattatataaaggttttaaaatacgtaatatataatgctcaacaaggagtgggtgcacctctacaggtaagttgttttttatataggttagtttcattaggaaattatgagaccttagatttagttcgcagatcaaaatccgcataggtgtcgaacaacaccacccctggtgtcgagcgacaccaacacctgacggcaatttcaagacgcaacttattgatattttgaagatttctaaatttggcccagaactttctcttatgtttaatgaaggcccatcacgtttttaagacatatatatagtttttaggtcattgtttagacctaagcttggagagactaatctcctgtttctcttttgtactttgggagcaaaactctatggagactccctttacagaagatctttcttactcttttcttttgttattttcatcattgatttcttattcagactatgatttgtgtttctttgatcatgtttgagtaatccacttgttaggtttagggcttctcattagggattaagatgatttagtagattgcccccttgctaggttatctgtaggattcttcatcttgattgttcttaatgctagttctagagtagctaactagaaattaatattagagaataggtatgcccaccataggtacttgttatttgaactataatcgatgagcctaggtatttaagaaagaacagttaggctcatagaagggctctggtttaggtactaggtgaactaatcaaacttgataataatgcatgctctagtataggatttctcggcttctccagttatcttaactctaagtatagagagttttgcggaacaccactggttactctaaaattatagtttgagttcgagaacggtttgataacaacctagctatttctagatctactatcatctatttcctgagaataccctaagcctgacgcttttaatatcttgtttcacaaccaaccaatcgtctattgcttacttttgtttctctttagtttcattacagttttacttatcttaattcaaaaccttcgtctattgcatgatccgagagctttgtgaattcgatctctaagtgttgcaactgacctctttatttgagagagtggtcttaggattaatttgtcctatatcaaatttggctccgttgtcaaagttctctttgattcaccattagactaggtgtagaatttagactaagcttttatttttctttattttgttactcacgcgttttctttcttctttttcctgtgatagggtaattacaagatggaacgcaacaaactgcaggcagatttcgccgactgcgtcgaccgacaccaacagggtgtcgatcgacaccttctgtagaacaaaccagctaccataggcgacttcaacaacgctgatcttttctactccaatcgatcagcgatccaactacctccttttgcaagagaacactttgctattcaccctgcatactatactcttgtttcacgaggaaagttttgaggacattctgatgaatccccactagatcatctagaagtctttgaagacttagtgtcctcaatcaaaggagatggtgtacaagctgattatcttctttgcaaactcttcccacactctctcgcgggcagaggaacatcatggttgtgacaaatagaagcaggttcattgaaaaattggactgacacaaagaacgcattcatgatcaacttccttgatgattcagtgacagaattattaagagagaagatctcttcattttctcaagctccaatagaaagtttaaaggcagcttggatcagcttgaatgagattgccaccgcaagcaaagaaaatcatgtttcagcaatctctgctcctgtccaagccccccccccctccccccctcaaccctccttagacagccgactcgactccatgcttgcgcagattcttgagagctaaacaaagctcgtggttgatcttaatggcaagtttgattatgtgtacacagatcttaataggaagatcgacaatttgagatctcatatatctcagccttctcctacctcagcatttgtctatgtagtcacactacacagtggaaagaaaccaaacccgatccttcagcgagaactttcagaaaagacttcatctcgtccagttgcagaaaaaacttcagtgtcaatcgatacataagggtgtcgatcgacaccaattgatcttaacgactctgttttacctttgtcaagtggaatcaataatttcacagaggaggaggaacttatacccgatggtgtcgaacgacaccattaccttcgtcgatcgacaccaacaattctcaaggagaagtcaagctgtgacaaacccatatcgaccagagtcgaccccgacagtgtcgaccgacaccaccttggtgtcgatcgacaccaacatcacatagacaggccactattgatgtttgaaagagcaggatcgatatcagacagtattgtcgaccgacactcacctagtgtcgatcgatattggacttagactccacctatctgccttgaatctccgcctattgcttacacaccaaaaattccttgtctactgcctcgacagtccaagcaagagattcctgagatgcgttgcatgagtatcatggatgaggttctacttcagttgcctccagttgaaatagacaagttgtcaccccctcttcagagtgctatgatacgagacgatgctttagagaagcaggatgacaagacaaagacagtggttgtctctgaacaggtacttcgcaacagcaagcgtccacatgaagcaagctccggattcgttgctgagaatcgatttgcagagatggtgtcgaccgacaccagtacctgtgtcgatcgacaccccaaacgggctgaaccagaactgtgtactaaagctgcttcgcaagttcagatcactgctgctattctaggacctgttgtcacgacaaccactgcatctctacaactgcatccacctccgaggaggcaacggtactcatatcttcctcttaaacctacagatatcatcaatttgactttaaaatttccaaagactgtttcacggtttagcaagccacgagtttctcgtcgagcgcttgtttgttcttttgatgattgtgcaggtaaaaggagtattccacccatacttgagtctcaccctgctgatgttccgcacttctttggtcaacctcacacaccaactgcctataagccacctcggatgatgagacgtctttcaaagaagcatttactgccaccttttgatccacctgatataaaaaatccaggaaagtcaagctattgagtctaaagaagcgtttagtgggaggcaacccacttgtatgattttctttttcttttctttttcgttttttttttctcgcttactccggatttgaatgccacttgggacagtgacgtttaagtctggtggaggcgcttactaactacgttttctttttgagtgttattcttatacatatttttctttttcagtcgttttattgagtcaaaattttgttaggaattatgatctctattctttagattatatcgtggttgattaatgctgcaggttcgactcaatccgactattgtaaaatttagatggcaaaccaacaaacttgaggatatcctagtttccaatacaaccactaaggttagagctaatctcactgctctttcttttacctcatcaatcggttagtattcatagatattgactccttatcatacctgatattgagaccaatgtgataaagaaaagtattcctctccccttataaaaataaaataaaatgaatgatgaataagagattgataggactttcagatagtgtataggggtaggaatgtttcctatgaccccattattatacattatttggaatgatcaattacaaaggttggaaaaatgcctagggtgtcgatccagtatgcgagttcccctttgtttactctctaaaaagaataattctggggagagaaagaacaccaaaaaaagaatataaagaacggtcgatttatcatggtatagtacaggattgaatctagacggatcttgaatgttagcttgtttgatgagacccagcgatgaaagcctaggggatatagttgtggaacttatgtatggaatctagaatgttgtgtaagcttgcagagaagtacatgttggttaggatttgattagaactgctagacatatggatttggttaggatgatcaaggcaataagctagagaatgttgggagttcctgtgttttcaaacctcttccatgggttcggcttttgtgttttgcttgagggcaagcaaaagctaagtctcggggagttgatataaccctatttttactgcttttagctatgatttaggtataggttttagagtccttttgtgatatgatcatggatagcattaacgatatggagcatgaaccggagcttgaacgtgagcttgtagccgaggaaggagctaagcttgtagctgaggatgagcttgtagctgaggagaacttgtagcggaggatattcttgtcacaccggccgtcccaatgacttgttctagagctaagctattcgaccaagccattgccgggatgcttaaccacatttgggaccgaccaaatgacttgagccaagtcactacctctttggttttgattcaagctcaaggacctcatcaagatggataagtgattcatgagtgctctttttccctgcctttggttttgtcccactgggttttccaaaggaaggtttttaatgaggcttatgttttcacttcatataatccattttgatgattcaaggcccaaacccactaaaataaagagacaatttcgtggccttagtagttgaagagtttattttgattttcaaaaattgtttttaatttctgttgttttctaggcagccttggagcatgttccaagacttgcctcttcatcttctcttctccttctctttatatactcttgtatttacttttgagaacttatctttcttttaatcaaaaaccttttctaagaagatcatcttgttggtgtgtatatccagcaaaatccttagtctcttttagtgcgcatatccaaaggatctaagtctcgatatcttgaagcccttccgcaagcttctgtgatatccatcgattcatttaaatctatccatcatcacggcatcacagccacctctatccatttctcaacctaagagtgccgagtccttgggaggatctcatcatgtggtatcagagcacactctgaaagttgagttttccatcgttatcattttgtatattttcatctttagatctgtgtccgtctgtcaccttgatttaattttcataattatttggtgcatgctaaaattgcgaaattaactgtcacgggtttgaaaaatactctagtattttttaaaattgtttctggaatttttgggaacgttatgataatatttagcatccgaacaagtgaaactgtcgtaattagggttctagggcatctgaagggttatttcgtgtttgtttaaaaagaactagttactggtgttgttttgttgtctctattgcagaaagaatggctgaatctgaggaggaagagactagccacaatcgaaacaacaaacttttggtggaagcctttgagaaaatgatggataccaaactgaatgcttttcgccaagagtttcatgagaaactagagttggggcagactcgtcctcgagaatgaaggagagttaatgagccgcttgagcaaagagatgaagctacagatcagtactatgggcataggagcacttcatctcacaatagtcaaaggagacaccatagacgtgctagagaaggtagagatcttttgcaagacaatcttggaggtcttaagcttaaaattccaccattccatggaaagaatgatccagatgcttatttggaatgagaaaagaagattgaattggttttcaaccttcaacactacaccgagatcaatagggtaagagttgctgctactgaattttatgactatgctttgagttggtgggatcagctagttacttcacggagacgtaatcaagagcttccattggaatcttggtccgaaatgaaagctattatgaggaagaggttcgtccctagtcactaccaccgagagctgcatctcaagttgaggaatcttacacaagggaaccgttctgtcgaagagtactacaaggaaatggagactttgatgttgcgggctgatatttctgaggatagagaagcaactctgtcaaggtttcttggggatttaaacagagatattcaagacagattggagactcaatactatgttcaaatagaagagatgttgcacaaggcgattttgtttgagcagcaagttaagaggaagagttcttcacgatctagttatggttcaggaaccattgctaagcctacttaccaaagagaggagagaaccagcagctatcataataagccgattgtcagtccaagggccgaaagtaaaccatatgctgcagttcaagatcacaaaggaaaggctgaaatttctacatctagagttcgtgatgttagatgttacaaatgtcaagggaaaggacattatgctaatgaatgtccaaataagagagtcatgattctcttggataatggagaaatagagcccgaggaggagattccagattcaccttcttcattgaaagagaatgaggagctgccggctcagggtgagttgttggtagctaggagaactttgagcgtccaaaccaagaccgatgagcaagaacagaggaaaaacttgtttcacacgcgttgccatgtgcacgggaaagtttgcagcctcatcatagatggagggagttgtactaatgtggcaagtgaaactatggtcaagaaacttggattgaaagtgcaaaaacatgcgaaaccatacgatctttagtggcttaatgacagtggaaaaatgagagttaaaaatcaagtggttgtgcccattgtcatcgggaagtatgaagatgagatcttatgtgatgtattaccgatggaagctggacatattcttcttggaaggccgtggcaatctgatagaaaggtaatgcatgatggtttcactaatcgtcattcctttgagtttaaaggagggaagactattctggtctctatgactccacatgaggtttatcaagatcaaatacatctgaaacaaaagaaagaacaagtcgtcaagcagcccaacttctttgcaaaatctggtgaggttaagagtgcttattcttctaaacaaccaatgttattgtttgtttttaaagaagctcttacgagcttaactaactttgcaccggtgctgccgagtgaaatgacttctcttttgcaggattataaagatgtatttcctgaagacaacccgaaaggactaccaccaattcgtggaattgagcatcagatcgattttgtgccaggagcttcacttccaaaccgaccagcatatagaaccaatccggtggagacaaaagaactacaaagacaagtggacaagcttatggagaaaggacacattagagagagcatgagtctctgtgccgttccaattttgcttgtgccttaagaaagatggcagctggagaatgtgttttgattgcagagccatcaacaacgtaacggttaagtattgccatcccatccctagattagatgatatgcttgatgaattgcatggttctagcatattctctaaaattgatcttaaaagtggctatcatcaaattaggatgaacgagggagatgaatggaaaactgcatttaaaacgaaacatggtttatatgagtggttagtcatgccatttggattaactcatgcacctagtacattcatgaggttgatgaatcatgttctaagagcattcattggaatatttgttatagtttactttgatgacatcttagtttacagcgaaagcttgagagagcatatagagcatttagattctgttttgaatgtccttagaaaggaagaactttatgccaacctaaagaaatgcacattttgcacagataatcttgtgtttttaggctttgttgtgagtgcagatggagttaaggttgacgaagagaaagttaaggctattagagattggccgagtccaaagactgtgggagaagtaaggagtttccatggccttgctggattttataggcgatttttcaaggactttagtaccattgtcgcaccactcaccgaggttatgaagaaggatgtaggattcaagtgggagaaagcacaagaagaagcgtttcagtctctcaaggataaactaaccaatgcacctgttttgatattatctgagtttcttaaaacgtttgagattgagtgtgatgcatcaggtataggtattggagctgttctaatgcaagatcaaaagcttattgcctttttcagtgagaaacttggaggagctacgctaaactacccaacctatgacaaggagttgtacgccttggtccgagctctccaaaggtggcaacactacctatggcctaaggtgttcgtcattcacactgatcatgaatcgctaaaacacttgaagggccaacagaaacttaacaaaagacatgcgaggtgggttgagtttattgagacatttgcctacgtcatcaagtacaaaaaaggtaaggataatgtagttgccgatgcattatcccagaggtacaccctactctctactctcaatgttaagcttatgggttttgaacaaataaaagaagtttatgaaactgaccatgattttcaagaggtttataaagcttgtgagaagtttgcttctggtcgttattttagacaagacaagtttctcttctatgagaaccgtttgtgtgtacctaactgctctctacgagatctatttgtcagggaagctcatggaggtggactaatgggacactttggcattgccaaaacgttggaagtcatgacagaacatttccgttggccacacatgaaatgcgatgttaaaagaatttgtgggagatgtaatacttgtaagcaagccaaatctaagattcaacccaacggtttgtatactcctttacctattcctaaacacccctggaatgatatttcaatggattttgtgatgggattgcctaggacaggaaaggattctatctttgttgtggttgatagattttctaagatggctcatttcattgcttgtcattaaactgatgatgcattgcatgtagctaatctattctttaaagagatagttcgtttgcatgggatgcctaggtccatagtttcggatagaaatactaagtttcttagttacttttggaaaacattgtggtttaagttaggaactaagctgttattctctacgacatgtcatccgcaaactgatggtcaaactgaagtggttaatagaaccttaggtactctcttgcgtgcattgattaaaaagaaccttaaaacttgggaagaatgcttaccacatattgaatttgcatataatcatgccatgcattctgcttctaagtattctccttttcaaattgtttatgggttcaaccccatctcaccttttgatctaatccctttgcctttgagtgaaagagtaagtattgatggtaaaaagaaggctgagctagtgcaacagatccatgagaatgcgaggagaaacatagaagaaaagaccaaactctatgctaagcaagctaataaagggagacgagaacaaatcttcgaagttggagatatggtgtggattcacttaagaaaggagaggtttccagctcaaaggaagtccaaactcatgccaagaatagacggtccattcaagataatcaaacggatcaacgacaatgcctaccaactcgatctgcaaggtaagtataatgtgagttctagcttcaatgtttctgacttggtaccttttattgcagatgaaccagatttgaggtcaaatccttttcaagagggaggggatgatatgatcatggatagcattaatgatatggagcatgaaccggagcttgaacgtgagcttgtagccgaggaaggagctaagcttgtagctgaggatgagcttgtagctgaggagaagcttgtagtggaggatgttcttgtcacaccggccgtcccaatgactcgttctagagctaagctattcgaccaagccattgccgggatgcttaaccacattcgggaccgaccaaatgacttgagccaagtcactacctctttagttttgtttcaagctcaaggacctcatcaagatggataagtgattcatgagtgctctttttccctgcctttggttttgtcccactgggttttccaaaggaaggtttttaatgaggcttatgttttcacttcatataatccattttgatgattcaaggcccaaccccactaaaataaagagacaaattcgtggccttagtagttgaagagtttattttgaatttcaaaatttgtttttaatttctgttgttttctaggcagccttggagcatgttccaagacttgcctcttcatcttctcttctccttctctttatatactcttgtattctcttttgagaacttatctttcttttaatcaaaaaccttttctaagaagatcatcttgttggtgtgtatatccagcaaaatccttagtctcttttggtgcgcatatccaaaggatctaagtctcgatatcttgaagcccttccgcaagcttctgtgatatccatcgattcattcaaatctatccatcatcacgtttttaagacatatatatatatatatatatatatatatatatatatatatatatatagtttttaggttattgtttagacctaagcttggagaggctaatctcgtttttctcttttgtactttgggagcaaaaccatgtggagactccctttagagaagatctttacttactcttttcttttgttattttcttcattgatttcttattcagactatgatttgtgtttctttgatcatgtctgagtaatccacttgttaggtttagggtttctcatttgggatttagatgatttagtagattgcccccttgctaggttatctgtaggattcttcatcttgactggtcttaatgatagttctagagtagctaactggaacttgatattagataataggtatgtccaccataggtacttgttatttgaactatcatagatgagcctaggcatttaagaaagaacatgtaggctcatagaagggctctggtttagatactaggtgaactaatcaaacttgataataatgcatactttagtataggatttctcggcttctccggttatcttaactctaagtatagagagtttcgcggaacaccaccggttactctaaaatcatagtttgagctcaagaatggttcgataacaacctacctatttctagatatactatcatctatttcctgagaataccctaagcctgacgcttttaatatcttgtttcacaaccatccaatcgtctattgcttacttttgtttctctttagattcattactgttttacgtagcttaattcaaaactttagtctattgcgtgttccgagagctttgtgaattcgatccctaagtgctgcaactgacctctttatttgagagagtggtcttacgattaatttaacctatatctattcacatgggatcaaatgaatcacaaatacccatcatttgcaccagaagaaagcaatctgaggcttgaactttctactgatggatttaatccattcaagatgaagaatacaaggtatagttgttggcctattttgctagtaaactacaatctgccacctcacttatccatgaagaaggagaatatcatgcttaccatgttaattcttgggcctcaacagccaggcaatagtattgatgtctacttagagccactcatagaggttctatgctagctgtggaattgtggtgagttaacttatgacgatttcaataaaacgacttttactcttaaggcaatgatgctatggaccataagtgattttcctgcttatgggaatcttgttggctgcaaagtaatgggtaaaattggctgtcctttatgtgagaataatataaactcgaggtggttgaagttcaggagaaaatatgtgtatatatgccacagaaaaggtcttctaccaacacatacttataggggaaagaagtcatggtttgatggaaaagctgaacatgagagaaggggaaggatactaagtggtcgtgaaatttttcataacctgaaaattttcaaaaacaactttggaaatctgatacaagctgcaagaaagagaaaaaaagagggaaaatgctgaattagactctgatagtgaggatgaatctagtgagtcataagaagatgagggggaagaagtggacgaggaggagttatccatatggaagaaaatgtcgattttattcaagctaccttattgggaggaactccctgttagacataacatcgatgtaatgcatgtggagagaaatgtggttgcgagtattgtatcaacattgtcgcattgtgggatatcaaaacatgatttaatgcttgtagagatttggaggatattagtattagaaacaaattgcaccctaaacttagaggaaaaagaacatacctaccaacagcagtttggtttttatcctatacagagaagaagatttttcgtaggcgacgttttgagttcaaagccccagatgggtactgctccaacatatctagaggcgtctcattagaagaatgcaagatcacatgactgaaatcacatgattatcatgtgttaatgcagcatcttctttccattgcacttagaggtttggtgcctaaaggtcctagggtagcctttgtacgcttatgctcgtatttcaaaatgttgtgtcaacgagtaattgatagggagcaaatattggctatggaggctgagattgttgaaactctctgcatgtttgaaagatatttccctccaagtttctttgatataatggtacatttgacagttcatctaggaagggaagctcgtcttggaggactagttcattttagatggatgtatccgttcgagaggtacataaaagtcctaaaagagtttgtccaaaacactacaagactagaggggtgcatttctgagtgttatcttgcagaagaatgcatccagttttgtaataatgttttgaagaagacgtcaaattttcaagcgaaagcagacaaaaacattgagtatgagaacaactctattcttgaggggctaccaacatctgcaggcagatcaatttctctcactgatttggagaagaaaattgctcatatggctgtcattcaaaacatggttgtggttgaaccttatgtagagtaagttccacattttaatctagttcattacacattcctataattgataaaccaattgtagctgatttcttcttattttcattttccctgacaagtgcacatctgcaacatctacaaaactcaaactcaagatgcagacgtgatgcatcaacactatggactatgcatcgcctcttggttaaaaaatcaagcgaataaatattaaattagaatatcttacctgcttcttaaattctataactgtctgacataaattactttccttttgttagataccgcttgattcaaacagtcatgctgagactctaaaatggttggcatttggtccacgtagttgcgcacagtcatataaaggatatatagtaaatgggcaggggtttcacacaatatcagtagatagaaaaagtcagaatagtggtgtttactatgaggctacagcaatctgcaggtctagcctaaggatacttcacaagtggtggatttggtatcatactatggggcagtaacatacattatcttgttggactacaatgtgttttatgtccctttattcaggtgtcaatgggcatttaagggtaatggagtgaaggaagaagatggtttcacgctcgttaacctgaatcatagtcaagttagtttttcaagagacccgtacatattagcctctctagaaaagcaagtgttttactctagggaagacgagtcataaagctggcatgttgctatgagaggtccttctagaagattcagtctgaaagagtttgacgctggcgatgcagacatcttttgcctgcaaatattgacatgagtgttgacttagatgaaacagaaaatgaaagaactgattgtgaagggatatatgtgtggttcttcttcattttcatgataagttagactttgtttgaatagatgtcgcattttcatgattagttagactttgtttgaatagatgtgtgatagggaattgtttgtttcacatatattatatgttgctcagcttattgtctgatagttgattgtttctttgtatattttatatatattaacattttttctgtttctttttcaaggtgatttgaaatggaatctggaaagaaaaagagaggaagaagacttaaacagaaagatgatgaggtagaatatgagggtacccgtgaacctgaactagttgaaccaaaaacatcaccccaagtacaagctgatcctcaactagaactcaatgaagaagaggttcaaggtgaagtgacgcctaacgctgagaaaggtctcattgctgaagagcctgaaggtgagatacaattcattgaagatcatgacaacgttgagagaaagagtaagaaacagcgaggacagacacgcatgaaagacatcgccaaggatccaaatacaagagcacatgtacagttcaatagcctgggagaaccttatggtaaagggtttgttaagatggcatcacatatgatcgttggacaaaaataactgaagaaattagggctcttctcatgaattagtccaggtgaacttcctaatgcaaaaccttaagatgttttaagttcaaaatttataggtattcaatttaccttcttttttttttttttggtgaactatgattgcatgcaaggtttgagatagatgaagaatactagaactatgattacccatttgagtggcgaaaactagtcaaaatcaaaactagcaaagagtttaagataatcctttgtacttaactaagtttattttatatatagtatcttacataaaagcatttctctgttaggttgttagtgatagttataaggatagaaggagcaaacagattcctcacaccattagccgcaaaggaatggttagactagcagaagatatggtaataataccataactatgttgcatgttttttctcattgtttataatacttattaactgtaattttttttttgctctgaattagaaaaaggagagttcaaatccaagtgaagtatcacggctaaaggtttggatcaagtcacgtaccagaaaagattttatctatgatttagggttaagatttagagtctttatgttatttctcaaatctttttagtgtctttttaggtattctatgcaatgggacaacaatggagatgatgagacattttggagcaaaagctaaggatgattttggattcaggaatcagagagagtgttgatcgacacacccttgggcagttggatatgtgaatgggtcgtgaatggtcgagggattgatgagaatgtggataagtgacgataggtggcttactcagttaattctggcatggaacgtgttatattcctaaggaagccttgatttgtgtcatggaccctcatgagacattggggacggagtgtgccgtatcaatgttcttgcggtccggtgatagatagtaggttttaccggaatgaggaaacggacggccatgattgaacattggctcatgtttatccgttaagggtcaagcttatctacaagccattcatccttatccatttagggtcgtgcttatccttttttggatgatatttatcggaaaaaatggaaggaaccaatcggaggccgattagtgtcctggatcgcccgtgggacgacatttgttgcgttctgactggtccaggccacctcgtgcttccccatagccgacctaacacccatataaatactccctccgctcatttgattccttagacccaaaaatcactgagaagagcttagttcgcgggaggaaacctttagaagccaaaccgctcgggaaatccaagtgagtcttgagccacgtgaagtagcatgtgaatagaatagtttattcatttatgtccttaatatagcttaggaggttaattatgattacttagcttaattattcgcttaatccttgattaggatagttaattaggtttagtaattgttaattaggattagtatgactaattaggattaatatttcctaagcatgattagggctagttaaaccatgattagggggactaaccgcgattagtagtaattaagtacgattagttgtttgattagtagagttttgcatataggatgaatgcatgatagtatgtgagtctgttgtcatattagttagtctttaattagatgactagcattagccgaaccatgaggatcccgtccgtatgttgtgcgttgcgtgtaactttgttccgttatggcatacgaaggctcggggctggatcgctaccgattgggcgctacatgacgatgtagtataaaggaatgctatgtctcttatagactttgtgtctaagagtatggaggcatgtccttgggagatcatggattcgtagaaggccttacctaggttgatagaagcatgcttgcattagttatcctctacatattaagaaattcgaatctgcatgcattttgcattgtgcattatattttgcttgtgttgtgtgttgcgtgttatcttttttatatcttgcttgttaggttgtattattgttacgtgttgtttgctgcttagggggtaaggaagggtattaggataacactgtctagatctggggttcactatgtaattgtatattacttatgatgctacttattcttttcaggataccatagttgccaaccttgtagaggatgctcgtgacttaggacgaaccaatgtaggttttacggctttttgtaaattcttactaagtatattatgtatggttttcaaaaaggatccgaaaactatatacgttttggtaagcatttctcgtatatatatatatgtataagacttggatttctaaaatttatatggttatactgactgatattagtcttgtcctacttacacaactcgaatccgcagtacgggttgaaaagccttaggccaggggcgagaggctggactcttacggttggacgactcgggcgaacgaattcatttcggaaacctgcgttggccgattgcgggcatttaacgtgacgctcctattttgtttatatttttatagcgggatagaggtgttacaaggtggtatcagagcatggtttatgatgctatgggaaaccatggtttttaatgttttatcgagtaaatgtgttgcaaaaagctattaggaaattggttcagtcacttgctagagtttaggtagattggcctataggatttaccctttttgtttaggttggcttacccttgttgttagtataataggtggcttacccttttacttatatttctgtgtcttaacctttttttttgtattatagtatgccgctaaaaagatctcgtggtagggagtctgtggaggaggagggacggtccttggatctgccgtccaggcgatatgaccttcgtgagagagtcaggggtaggtgggtgaggaaggatgtggtcgagtgttcctgaattatgtcggagactggatcgagcgatacggttgctgattttggtcttgcagggatagctgctatgccagagcggattatccgggaggatgtgcagataagggatgggatgatgatcgattcggattgtgaggatgattttgtgatcacgggagtgaggacggtggagcagaagctggcttcggagggacatgaaatcgtgatggtccatgactatgtgagtgtttcctcgaaaagttctgcctcgccatcctttgcacttagcctatattcaccaatatcctatgagtcagatccgaaggaggatcaggatccaccgatttctccatacgtcccggaggctgttgatcactctcccgatagcccttttgcactgttatgggagggcacgtcccccatactccgtttcgaggctgatatgagggctgacgctattccgacctttgatgggggcttcacatcgggtatcaagatactgttctgcttcatctgtggcgaggatggtcattacccgcaagactgtcagttctacacgcagtacatcccatggccattgcttgtctctactgtggagagtatgagcattatgcggctacctgtatgctgatgagagatgacggtcagattcttgcaccgacgtatacttccctatctcacgtagcaggaccatcatccccattgattcccaacaccgaggatgatctttttctaggttgtacctgttcgaggtgtagcttagggttaccgtgattcccctaggaatcataaaccttagtaaatatttggaaactaacccaagaaaaggcttatgatttatgatggcgtggcagaactgctagaggaaacactcacatagtcatggaccatcacgatctcatgtgcccctggagccagctaatgctccaccgtcctcaatcccgtgatcacacaatcatcctcacaatccgaatcgatcatcatcccataccctatctacacatcctcccggataatccgctctgacatagcaattatccatgcaagaccagaataagcaactgtatcgctcgatccaatcttcgacataactcgggaatactcggccacatccctcctcacccacctacccatgactctctcacgaacgttatatcgcctggacggcagacccaaggaccctccctcatcctccacagactccctaccacgagatctctttagcggcatactataatacaaacaaaaaggtttagacacgaaaatataagcaaaagggtaagccacctataatagtaacaataagggtaagccaacctaaacaaaaagggtaaatcctataggccaatctacctaaactctagcaagtgactgaagcaatttcctaacagctttttgcgatacatttactcgattaaacattgaaaactatggtttctcgttgcatcataaaccatgctctgataccaccttgtaacacccctatccctctataaaaatataaacaaaataggagcttcatgtcagacgcccgcagtcggccaacccaggtttccgaaacaaattcgttcacctgagttgtccaaccgcaagagtccagcctcccgctcgtggcctaaggcttttcaacgcgtaccgcggacgcgagttgtgtaagccggataagacttatatgagtcagtataaccatataaattttagaaatcggagtcttatacatatatatatatatcatacgagaaatggttaccaaaacgtatatagttttcagatcctttttgaaaaccatacataatctacttagtaagaatttacaaaaagccgtaaaacctacattggtttgtcctaactcacgagcaccctctgcaaggtcggtttactatggcatcctgaaaagaataagtagcatcataagtaatctagcattacttagtgaaccccggatctagacagtgttatcctaataccctttcttaccccctaagcagcaaacaacacgtaacaataatacaacctaacaagcaagacataaaaaaagataacacgtaacacacaacacaagcaaaatataaagcacaatgcaaaatgtatgcagactcaaatttcctaatatgcagcagacaactaatgcaagcatgcttctatcaacctaggtaaggccttctacaaatccatgatctcccaaggacatgcctccatactcttagacacaaagtctataagagacatagcattcttttatactacatcgtcatgtagcgcccggtcggtaacgatccaacctcgagccttcgtatgccataacggaacggagttacatgcgacgcacaacatacagacgggatcctcatggttcggctaatgctagtcatctaattaaagactaactaacatgacaacagactcacatactatcatgcattaatcttatatgcaaaactctactagtcaaacaactaagcatacttaattactactaatcgtaattattccccctaattatggtttaactagccctaatcatgcttaggaaatactaatcctaattagtcatcactaatcctaagtaacaattactaaacctaattaactatcctaatcaaggattaagcgaataattaagctaagtaatcataattaacctcctaagctatattaaggaaataaatgaataaactatcctattcacgtgctacttcacgtgactcaaaactcacttggatttcccgagcggtttggcttataaaggtttcctcccgcgaactaagctcttctcagcgatttttgggtctgaagaatcaaatgagcagagagggtatttatatgggcgttaggtcggctatggggaagcacgaggtggctcggaccagtctgaacgcaacaaatatcgtcccacgggcattccgggacactaatcggcctctgattggttccttccgttttttggataaacatcatccaaaagtggataagcaagaacctaaatggataaggatgaacggcttgtagataagcttgagccttaacggataaacatgagccacaattcactcatggtcgtccgtttcctcattccggcaaaacctacgatctgtcactggaccgcaagaacattgataagacacactccgtccccaatgtctcatgagggtccatgatacaaatcaaggcttccttaggactataacacgttgcatgccagaattaactgagtaagccagcaatcgtcacttatccacattctccgatcaatccctcgacccattcacatatccaactgcgcaaatggattcccctcaaccctctaaggtttcctagtctttcaaaggtttcctagaccaaaactaaggtttcgttaagctacctagttcttagggctagcctaatggttttggggtttacggatagtcgcatcgtaactaagcttggcccgtatgatggagagtcattcctttacccgtagacttgatcctactcaatgttccttacccatgacttgccacactaaatggccgaactaatcttgccttttcttggcttgatctcgcattctactcgacaaactttacgtccagccgcatagtcaaggtcaggggcattacattataactagtatgtaattctaaatgtataactaattattcttagaaaacccatattatagctatatgaaaacatacacaatagcaaataaataaatgatctataattctatcataacactaaaatatttgttttcaaatattgtattatagcacatgtaaatgtcagaattaaataatttaccgctttacacaagagctatagtataagcatattttttagcacaaaacggatgctacacaaatatatattgaagcaaaataaaatagctgttgtactatgatatacgataacaaaacacgtggtgctatatgaaaatacttaatagcgttttatatttgctatcgtattcgtcaattgtgtagcaattaaaaaaatgctatagtatgggttatccctaggatggctgcctatgtcatagcatttgtgaattcgctaagttatatgtatgataacagatattttgcgctaataatgtcaaaatttcttgtaatgattgggattgattctaatcttcttcttatccaaatcgatttttgagaatctcaaagttaagtttcctagggtctttgtagggtgtcaaagcaaagatcgatagttataacctagaaaatagtcgcccacataaaactatgtacaccaatgtaggggtaaatgtgtaacacgtggaagaaatccagattgttacttatgaattgtaggatgaaggtatggggctaaatgaaatgttttttgttgcttggagcattgaaaaattgccttcaacttggaaggattttaagatctatctaaagcatctacaagaagacatgtctcaagcaattagttctcaatcttcgaatcgaagaggaaaatcgtaagaatgagaattctgagttttgttctatggaatcaaagccaatgtaattgaaggaaacaagtccatattcaaggtcttcaagaagaacaataacggtaagaaaccgttcatttcaccaaagggttttaacagcaagaagaagccataagatgttgttggatgtatggaaagcctgaacatacagccaaggactaccgccataagacggaaaggacattgtttgagatgcatgtaacacaaaccttgtcaaaatcagtttgttgcggtcgattcagaggcaaaaatgatgacaaactctaatgattggtgggttgacacgaagcatgtgtgctcttacgggagtatgttctcaacgtacaaacaaggttctaatgagaaaaacttatcatgggaaacatgagcaccacgacgattaaaaggaaaggaaaaatggttataaaactcacatatgggaagaaattcacactcatgaacgtgttccattatcagtcactactcgcaaatttgtacacgaaacccgatttatttcataaatattacacaacaagttaccaaacatttataagttttatggccaaggcctagcacaaaactactctcggttcctattgtccatcacgccctctattccccactacaggtttcctgcaaaacaagtagaatcatgagtaatgtaagattactcagtgagctcgggattccctacaacagacattagtttaccccaacccaaatacccaacatggaacacgcaacagagaatggcaacgtaaggtagattgccgaagcaaattataaagcatgcaaatgcattaagactccagttttactaagttttaaagggcccgatatgctgccttcaaaaacaacaccaaacacacacactcccgtgatttcctgcgttacaaccacaaaggtattcaaccggagcatcactaccaaacgctacaccgtcgtgtagacactcggtcagggtagctagccccgtctctccgagttcttcgcactacatggcgatcaagtaacaacgttacaaaaccccatgatagcacggttcactacgaaggtcagacatatcacgatcgtggcacgcttatggtctttgcctcctaccacaagcaccatgtaccaagaccccaaagtttaagatattatgaaacatatggttcattcaaacacatagaatcatcaatatcccaacacaatctctcaacaataaacaatagcataagaatctaaagatcacatatgcaatcggatataaccattcacacgatccatataactcacgaaatcaatcaagaatgcatgagaatatgattatgaaactcaaaccattatccataactcactcagtaaccaacagaatgcgtgcaacgattcgggcagagttttcggctacaggaccttaacttgaatcggatggacggttttcactcggcagcctctcacttttgctcactttctcttcacaaaacaattggggttgagttggtcttatataggcaaggcaatggcgagtcagcatgtccatgtctcaggcgcatgggcatgtcaaggaaagttcatcgatccgcccgtggtgacacgctcgtcgctctagcggttgagcgacacgtggccacccaaacttcggctccacgcaactcaaattcggctccaagcaactttgcttgggccccaagttagccgagccacccgtccatggcgcgttcaaaggtccggtggggcaaacttcgcccacggtacacccgatcttgcccaaacttgcccattcgtgcccaaacttgcccatctttgccctttgatttttcattgtgttttgggcacttaatgtcaattggccatgcattcgagcaactttctaaaattcggactcttgcccgtggccaatgtccttatgcgggtaactacagggtcgcaaggaacgggcaaccttgaatgctacgcctggaccatcccccggaagcttaaccccacaaaaatttttgttggatccgatgtcaactctaccctttattggacgattaacctgaacttaattctttatcataaagaggtgttagatcagggaaatgagcatatacattaaggacttcttatcccttttttgtggttcatacccttaaaccctatcctcttttcaagcctcatgcattctcatttccctttttcatttagcaaatatgtgcaaaaacgtcagagagaaaggaacaacacagtttcccgccacaaagacagaagaaggaagcaaaagaagagattttaacaaacggcctaagagtttattcttccttggaaccaattcaaaggtatgcccattagattcggtgtttaatagttctgtttccccttccaaaaaataaattaatatatatatataaaaaaaagagaagaaagaaaagaaaaggaaggaaaggaaacataacaaccaagagagtaacgcccccgaatcgcctatggccggacaagccatgggcgacccagttacgataactgtgaagatgaacgaccacgacttagtagaggttccagatgaatccagtttcttaaccaaattataatcgaccttcttcccactaggaacaccacttaggcttgccacaccacttaggcttgccaaccctcgtgatattctagtgttgagcgacccggactaggtcttatatcattaaccactcgactgcttttaagaaaacactttatacatagtatatagcttatgctttgcaaagagttacccaaaaatatatctttgtatcggatccttgttaaaatttacataataacaagtaattttgtagaagcaacgcaaaatatcctatttccggcatttcctagtgttcgtcttcccgctatggtcatcccactatggttacctgtaagacaataagaatcatgagtaatctagcagtacttagtgagctcggtctatgcacaaatatatctctagggtttaatcaacttaataagtaaacttagccatcacagatcacaaagcacgtaataaacgttttatcatatacttataataataccagaatatgcagccaaactagacacatgaatgaacattgggcccagcatactgccaaccttaccaaaaaggtgcaccacaacatcaacacaaactcccgcataagtgtttacgtggtctccacacgtatgctactacacacacgtacatgcacacccataccacacgtacgtacacaactgtgaacacccgagctatagccacaaaggcttataaccggaacatcattttaatgcatcgtcatgcattacctggcatacgctccgagtattgtaccatcatgtaagtgaccactcaagatcaaaacttattgacacaattacaacacaaaaaggaaggcaacagcttactctaagcatgattgtattaggtaaaccccctgaataccacttagacacaataacctcatgcagaactatatataagtagtttaccacaccctaaacaagtatagacaatcaagtaccaaatcacgtattaatatatgtacataatataacaaggatctaatcacaacctcatagcatatatcatataagtataacaatataacaaggcaagtaagccctcgaatcatatctcaattcatcaagtaaacttagttaaatctgaattcacttagcctagtcaccagtccattccattccttagtgatattactatcaagttcatcaaatgcccatattgactttgagattcaagttctaacttaagccgaattccgattagttaagtctaagtgagtaagcatgcatatgatctaaagactagctctagaaaacatgcaaacaaacacacaattcgaccaaaactcacagattcgatagttcggaaagttttctaggtctcaagcgaaactcctcgatcacggtcgacaattccttactcacggtcaagttttctcgaccaccagcgatgattctctagtcacggacaatgtttcctccaacacgggcgacgattctctgaatttgggcgagtttcttgatttcacacgacttattagttggacaaccttacaatctctctctctcgccttcaaaaatgaaattgggcggagagagccatatttatagtccgcccaaggttggccagactgcattgtccgctgccacatttccggacagctgccgcgcccataggcgacaggtgtctcgggtgatggcgtggcgacacgtggcgaccaatgtcactccactgccccatcagcttcggcttcaagactcagccaactttggctccaattttggttacttgagccgcaaggcaccgcgagtgaggtgtcctactcacgtcggttccgcggccggcggggcaaacttcgccgcggtacacccaacttttcccatctttgcccattcgtgcccattcttgcttgttcttgccctttgatggtttggaaccgtttgggcatatgcggtcaattggctttgcattcgggcaaaattttctcatttggtcctttggtcgtgcccaatgcccttatgcgggtcactacaaatagagtctagtggcatagttccaatgaaagacatggaaacctaaaggagaaatgagccaagagaagagagccccctcggaaaaacctaagtctgggggaactgaaagtaagaaaaaagtaaaggagaagaaggtgtttaaaagaagaagtggttggaaactgtggacctcaaccgatccgttctctcttgcggttttgcaacatatatttcattcgagactatacagtaaccctaaacactttaactccaccacttaaacaccaaaagcccctttcataccaagcgctgtctaccccgaatgacaccctctaatgagaaagtcaatgccaaaacatttaaagaatgtaaagtgttaattgacgtgaattcagagttccgcaggatcaaagcggatggacaaggacgagaaaggcataggactatcgagcgctcgttctaacttaacttttgtttaatgtggtctgtaggatatattcgagatacggtcattgataacaggagagttcccgcgattttcaaacctctccaccagagttgttcttttgtttgcttggggacaagcaaagtctaagtctggggagttgataacacggctttttagcccgttttagctattgttttcttatgtttcagagagcatttggtgccattctagggccaatgagaggagaaacacgtattctaggtgccaagaaggttttaaaagttttgaagctaaaagtatcaaaagacgatcattctagtgcttcggaagtttagcatccggccaaggtattctcgaactcggtgtgaagattttttggaatagagggaaagctataagagtcaagattcacgtcgaagtcgaatcaaagcaatccatgaagccgtctggaagatatggcccgaagagtgaagacatgtcaagaaccggctgtttggaaataataagtccaaaacacatccgagcgatgagacttgaatccgggcagctccgagtagctcaccaacgactactaggtcacgcccaagtctttccctttttgcgccaccaccattaggctccttccctgaagcctactacacggcccgatctcttaattatccagcagaatgacgttcttacccctaaacctaattcttgggcctcaagtataaatacttgtccttagccctaaccctaggtgtgccttcatcaccagagaaccctagccgtcgccaagagctgcctcctagccgtcgcacctcttgaagctt

SEQ ID NO: 184 - DNA, 138181 bp, Arabidopsis thaliana
aagcttgtagtggaggatgttcttgtcacaccggccgtcccaatgactcgttctagagctaagctattcgaccaagccattgccgggatgcttaaccacattcgggaccgaccaaatgacttgagccaagtcactacctctttagttttgtttcaagctcaaggacctcatcaagatggataagtgattcatgagtgctctttttccctgcctttggttttgtcccactgggttttccaaaggaaggtttttaatgaggcttatgttttcacttcatataatccattttgatgattcaaggcccaaccccactaaaataaagagacaaattcgtggccttagtagttgaagagtttattttgaatttcaaaatttgtttttaatttctgttgttttctaggcagccttggagcatgttccaagacttgcctcttcatcttctcttctccttctctttatatactcttgtattctcttttgagaacttatctttcttttaatcaaaaaccttttctaagaagatcatcttgttggtgtgtatatccagcaaaatccttagtctcttttggtgcgcatatccaaaggatctaagtctcgatatcttgaagcccttccgcaagcttctgtgatatccatcgattcattcaaatctatccatcatcacgtttttaagacatatatatatatatatatatatatatatatatatatatatatatatagtttttaggttattgtttagacctaagcttggagaggctaatctcgtttttctcttttgtactttgggagcaaaaccatgtggagactccctttagagaagatctttacttactcttttcttttgttattttcttcattgatttcttattcagactatgatttgtgtttctttgatcatgtctgagtaatccacttgttaggtttagggtttctcatttgggatttagatgatttagtagattgcccccttgctaggttatctgtaggattcttcatcttgactggtcttaatgatagttctagagtagctaactggaacttgatattagataataggtatgtccaccataggtacttgttatttgaactatcatagatgagcctaggcatttaagaaagaacatgtaggctcatagaagggctctggtttagatactaggtgaactaatcaaacttgataataatgcatactttagtataggatttctcggcttctccggttatcttaactctaagtatagagagtttcgcggaacaccaccggttactctaaaatcatagtttgagctcaagaatggttcgataacaacctacctatttctagatatactatcatctatttcctgagaataccctaagcctgacgcttttaatatcttgtttcacaaccatccaatcgtctattgcttacttttgtttctctttagattcattactgttttacgtagcttaattcaaaactttagtctattgcgtgttccgagagctttgtgaattcgatccctaagtgctgcaactgacctctttatttgagagagtggtcttacgattaatttaacctatatctattcacatgggatcaaatgaatcacaaatacccatcatttgcaccagaagaaagcaatctgaggcttgaactttctactgatggatttaatccattcaagatgaagaatacaaggtatagttgttggcctattttgctagtaaactacaatctgccacctcacttatccatgaagaaggagaatatcatgcttaccatgttaattcttgggcctcaacagccaggcaatagtattgatgtctacttagagccactcatagaggttctatgctagctgtggaattgtggtgagttaacttatgacgatttcaataaaacgacttttactcttaaggcaatgatgctatggaccataagtgattttcctgcttatgggaatcttgttggctgcaaagtaatgggtaaaattggctgtcctttatgtgagaataatataaactcgaggtggttgaagttcaggagaaaatatgtgtatatatgccacagaaaaggtcttctaccaacacatacttataggggaaagaagtcatggtttgatggaaaagctgaacatgagagaaggggaaggatactaagtggtcgtgaaatttttcataacctgaaaattttcaaaaacaactttggaaatctgatacaagctgcaagaaagagaaaaaaagagggaaaatgctgaattagactctgatagtgaggatgaatctagtgagtcataagaagatgagggggaagaagtggacgaggaggagttatccatatggaagaaaatgtcgattttattcaagctaccttattgggaggaactccctgttagacataacatcgatgtaatgcatgtggagagaaatgtggttgcgagtattgtatcaacattgtcgcattgtgggatatcaaaacatgatttaatgcttgtagagatttggaggatattagtattagaaacaaattgcaccctaaacttagaggaaaaagaacatacctaccaacagcagtttggtttttatcctatacagagaagaagatttttcgtaggcgacgttttgagttcaaagccccagatgggtactgctccaacatatctagaggcgtctcattagaagaatgcaagatcacatgactgaaatcacatgattatcatgtgttaatgcagcatcttctttccattgcacttagaggtttggtgcctaaaggtcctagggtagcctttgtacgcttatgctcgtatttcaaaatgttgtgtcaacgagtaattgatagggagcaaatattggctatggaggctgagattgttgaaactctctgcatgtttgaaagatatttccctccaagtttctttgatataatggtacatttgacagttcatctaggaagggaagctcgtcttggaggactagttcattttagatggatgtatccgttcgagaggtacataaaagtcctaaaagagtttgtccaaaacactacaagactagaggggtgcatttctgagtgttatcttgcagaagaatgcatccagttttgtaataatgttttgaagaagacgtcaaattttcaagcgaaagcagacaaaaacattgagtatgagaacaactctattcttgaggggctaccaacatctgcaggcagatcaatttctctcactgatttggagaagaaaattgctcatatggctgtcattcaaaacatggttgtggttgaaccttatgtagagtaagttccacattttaatctagttcattacacattcctataattgataaaccaattgtagctgatttcttcttattttcattttccctgacaagtgcacatctgcaacatctacaaaactcaaactcaagatgcagacgtgatgcatcaacactatggactatgcatcgcctcttggttaaaaaatcaagcgaataaatattaaattagaatatcttacctgcttcttaaattctataactgtctgacataaattactttccttttgttagataccgcttgattcaaacagtcatgctgagactctaaaatggttggcatttggtccacgtagttgcgcacagtcatataaaggatatatagtaaatgggcaggggtttcacacaatatcagtagatagaaaaagtcagaatagtggtgtttactatgaggctacagcaatctgcaggtctagcctaaggatacttcacaagtggtggatttggtatcatactatggggcagtaacatacattatcttgttggactacaatgtgttttatgtccctttattcaggtgtcaatgggcatttaagggtaatggagtgaaggaagaagatggtttcacgctcgttaacctgaatcatagtcaagttagtttttcaagagacccgtacatattagcctctctagaaaagcaagtgttttactctagggaagacgagtcataaagctggcatgttgctatgagaggtccttctagaagattcagtctgaaagagtttgacgctggcgatgcagacatcttttgcctgcaaatattgacatgagtgttgacttagatgaaacagaaaatgaaagaactgattgtgaagggatatatgtgtggttcttcttcattttcatgataagttagactttgtttgaatagatgtcgcattttcatgattagttagactttgtttgaatagatgtgtgatagggaattgtttgtttcacatatattatatgttgctcagcttattgtctgatagttgattgtttctttgtatattttatatatattaacattttttctgtttctttttcaaggtgatttgaaatggaatctggaaagaaaaagagaggaagaagacttaaacagaaagatgatgaggtagaatatgagggtacccgtgaacctgaactagttgaaccaaaaacatcaccccaagtacaagctgatcctcaactagaactcaatgaagaagaggttcaaggtgaagtgacgcctaacgctgagaaaggtctcattgctgaagagcctgaaggtgagatacaattcattgaagatcatgacaacgttgagagaaagagtaagaaacagcgaggacagacacgcatgaaagacatcgccaaggatccaaatacaagagcacatgtacagttcaatagcctgggagaaccttatggtaaagggtttgttaagatggcatcacatatgatcgttggacaaaaataactgaagaaattagggctcttctcatgaattagtccaggtgaacttcctaatgcaaaaccttaagatgttttaagttcaaaatttataggtattcaatttaccttcttttttttttttttggtgaactatgattgcatgcaaggtttgagatagatgaagaatactagaactatgattacccatttgagtggcgaaaactagtcaaaatcaaaactagcaaagagtttaagataatcctttgtacttaactaagtttattttatatatagtatcttacataaaagcatttctctgttaggttgttagtgatagttataaggatagaaggagcaaacagattcctcacaccattagccgcaaaggaatggttagactagcagaagatatggtaataataccataactatgttgcatgttttttctcattgtttataatacttattaactgtaattttttttttgctctgaattagaaaaaggagagttcaaatccaagtgaagtatcacggctaaaggtttggatcaagtcacgtaccagaaaagattttatctatgatttagggttaagatttagagtctttatgttatttctcaaatctttttagtgtctttttaggtattctatgcaatgggacaacaatggagatgatgagacattttggagcaaaagctaaggatgattttggattcaggaatcagagagagtgttgatcgacacacccttgggcagttggatatgtgaatgggtcgtgaatggtcgagggattgatgagaatgtggataagtgacgataggtggcttactcagttaattctggcatggaacgtgttatattcctaaggaagccttgatttgtgtcatggaccctcatgagacattggggacggagtgtgccgtatcaatgttcttgcggtccggtgatagatagtaggttttaccggaatgaggaaacggacggccatgattgaacattggctcatgtttatccgttaagggtcaagcttatctacaagccattcatccttatccatttagggtcgtgcttatccttttttggatgatatttatcggaaaaaatggaaggaaccaatcggaggccgattagtgtcctggatcgcccgtgggacgacatttgttgcgttctgactggtccaggccacctcgtgcttccccatagccgacctaacacccatataaatactccctccgctcatttgattccttagacccaaaaatcactgagaagagcttagttcgcgggaggaaacctttagaagccaaaccgctcgggaaatccaagtgagtcttgagccacgtgaagtagcatgtgaatagaatagtttattcatttatgtccttaatatagcttaggaggttaattatgattacttagcttaattattcgcttaatccttgattaggatagttaattaggtttagtaattgttaattaggattagtatgactaattaggattaatatttcctaagcatgattagggctagttaaaccatgattagggggactaaccgcgattagtagtaattaagtacgattagttgtttgattagtagagttttgcatataggatgaatgcatgatagtatgtgagtctgttgtcatattagttagtctttaattagatgactagcattagccgaaccatgaggatcccgtccgtatgttgtgcgttgcgtgtaactttgttccgttatggcatacgaaggctcggggctggatcgctaccgattgggcgctacatgacgatgtagtataaaggaatgctatgtctcttatagactttgtgtctaagagtatggaggcatgtccttgggagatcatggattcgtagaaggccttacctaggttgatagaagcatgcttgcattagttatcctctacatattaagaaattcgaatctgcatgcattttgcattgtgcattatattttgcttgtgttgtgtgttgcgtgttatcttttttatatcttgcttgttaggttgtattattgttacgtgttgtttgctgcttagggggtaaggaagggtattaggataacactgtctagatctggggttcactatgtaattgtatattacttatgatgctacttattcttttcaggataccatagttgccaaccttgtagaggatgctcgtgacttaggacgaaccaatgtaggttttacggctttttgtaaattcttactaagtatattatgtatggttttcaaaaaggatccgaaaactatatacgttttggtaagcatttctcgtatatatatatatgtataagacttggatttctaaaatttatatggttatactgactgatattagtcttgtcctacttacacaactcgaatccgcagtacgggttgaaaagccttaggccaggggcgagaggctggactcttacggttggacgactcgggcgaacgaattcatttcggaaacctgcgttggccgattgcgggcatttaacgtgacgctcctattttgtttatatttttatagcgggatagaggtgttacaaggtggtatcagagcatggtttatgatgctatgggaaaccatggtttttaatgttttatcgagtaaatgtgttgcaaaaagctattaggaaattggttcagtcacttgctagagtttaggtagattggcctataggatttaccctttttgtttaggttggcttacccttgttgttagtataataggtggcttacccttttacttatatttctgtgtcttaacctttttttttgtattatagtatgccgctaaaaagatctcgtggtagggagtctgtggaggaggagggacggtccttggatctgccgtccaggcgatatgaccttcgtgagagagtcaggggtaggtgggtgaggaaggatgtggtcgagtgttcctgaattatgtcggagactggatcgagcgatacggttgctgattttggtcttgcagggatagctgctatgccagagcggattatccgggaggatgtgcagataagggatgggatgatgatcgattcggattgtgaggatgattttgtgatcacgggagtgaggacggtggagcagaagctggcttcggagggacatgaaatcgtgatggtccatgactatgtgagtgtttcctcgaaaagttctgcctcgccatcctttgcacttagcctatattcaccaatatcctatgagtcagatccgaaggaggatcaggatccaccgatttctccatacgtcccggaggctgttgatcactctcccgatagcccttttgcactgttatgggagggcacgtcccccatactccgtttcgaggctgatatgagggctgacgctattccgacctttgatgggggcttcacatcgggtatcaagatactgttctgcttcatctgtggcgaggatggtcattacccgcaagactgtcagttctacacgcagtacatcccatggccattgcttgtctctactgtggagagtatgagcattatgcggctacctgtatgctgatgagagatgacggtcagattcttgcaccgacgtatacttccctatctcacgtagcaggaccatcatccccattgattcccaacaccgaggatgatctttttctaggttgtacctgttcgaggtgtagcttagggttaccgtgattcccctaggaatcataaaccttagtaaatatttggaaactaacccaagaaaaggcttatgatttatgatggcgtggcagaactgctagaggaaacactcacatagtcatggaccatcacgatctcatgtgcccctggagccagctaatgctccaccgtcctcaatcccgtgatcacacaatcatcctcacaatccgaatcgatcatcatcccataccctatctacacatcctcccggataatccgctctgacatagcaattatccatgcaagaccagaataagcaactgtatcgctcgatccaatcttcgacataactcgggaatactcggccacatccctcctcacccacctacccatgactctctcacgaacgttatatcgcctggacggcagacccaaggaccctccctcatcctccacagactccctaccacgagatctctttagcggcatactataatacaaacaaaaaggtttagacacgaaaatataagcaaaagggtaagccacctataatagtaacaataagggtaagccaacctaaacaaaaagggtaaatcctataggccaatctacctaaactctagcaagtgactgaagcaatttcctaacagctttttgcgatacatttactcgattaaacattgaaaactatggtttctcgttgcatcataaaccatgctctgataccaccttgtaacacccctatccctctataaaaatataaacaaaataggagcttcatgtcagacgcccgcagtcggccaacccaggtttccgaaacaaattcgttcacctgagttgtccaaccgcaagagtccagcctcccgctcgtggcctaaggcttttcaacgcgtaccgcggacgcgagttgtgtaagccggataagacttatatgagtcagtataaccatataaattttagaaatcggagtcttatacatatatatatatatcatacgagaaatggttaccaaaacgtatatagttttcagatcctttttgaaaaccatacataatctacttagtaagaatttacaaaaagccgtaaaacctacattggtttgtcctaactcacgagcaccctctgcaaggtcggtttactatggcatcctgaaaagaataagtagcatcataagtaatctagcattacttagtgaaccccggatctagacagtgttatcctaataccctttcttaccccctaagcagcaaacaacacgtaacaataatacaacctaacaagcaagacataaaaaaagataacacgtaacacacaacacaagcaaaatataaagcacaatgcaaaatgtatgcagactcaaatttcctaatatgcagcagacaactaatgcaagcatgcttctatcaacctaggtaaggccttctacaaatccatgatctcccaaggacatgcctccatactcttagacacaaagtctataagagacatagcattcttttatactacatcgtcatgtagcgcccggtcggtaacgatccaacctcgagccttcgtatgccataacggaacggagttacatgcgacgcacaacatacagacgggatcctcatggttcggctaatgctagtcatctaattaaagactaactaacatgacaacagactcacatactatcatgcattaatcttatatgcaaaactctactagtcaaacaactaagcatacttaattactactaatcgtaattattccccctaattatggtttaactagccctaatcatgcttaggaaatactaatcctaattagtcatcactaatcctaagtaacaattactaaacctaattaactatcctaatcaaggattaagcgaataattaagctaagtaatcataattaacctcctaagctatattaaggaaataaatgaataaactatcctattcacgtgctacttcacgtgactcaaaactcacttggatttcccgagcggtttggcttataaaggtttcctcccgcgaactaagctcttctcagcgatttttgggtctgaagaatcaaatgagcagagagggtatttatatgggcgttaggtcggctatggggaagcacgaggtggctcggaccagtctgaacgcaacaaatatcgtcccacgggcattccgggacactaatcggcctctgattggttccttccgttttttggataaacatcatccaaaagtggataagcaagaacctaaatggataaggatgaacggcttgtagataagcttgagccttaacggataaacatgagccacaattcactcatggtcgtccgtttcctcattccggcaaaacctacgatctgtcactggaccgcaagaacattgataagacacactccgtccccaatgtctcatgagggtccatgatacaaatcaaggcttccttaggactataacacgttgcatgccagaattaactgagtaagccagcaatcgtcacttatccacattctccgatcaatccctcgacccattcacatatccaactgcgcaaatggattcccctcaaccctctaaggtttcctagtctttcaaaggtttcctagaccaaaactaaggtttcgttaagctacctagttcttagggctagcctaatggttttggggtttacggatagtcgcatcgtaactaagcttggcccgtatgatggagagtcattcctttacccgtagacttgatcctactcaatgttccttacccatgacttgccacactaaatggccgaactaatcttgccttttcttggcttgatctcgcattctactcgacaaactttacgtccagccgcatagtcaaggtcaggggcattacattataactagtatgtaattctaaatgtataactaattattcttagaaaacccatattatagctatatgaaaacatacacaatagcaaataaataaatgatctataattctatcataacactaaaatatttgttttcaaatattgtattatagcacatgtaaatgtcagaattaaataatttaccgctttacacaagagctatagtataagcatattttttagcacaaaacggatgctacacaaatatatattgaagcaaaataaaatagctgttgtactatgatatacgataacaaaacacgtggtgctatatgaaaatacttaatagcgttttatatttgctatcgtattcgtcaattgtgtagcaattaaaaaaatgctatagtatgggttatccctaggatggctgcctatgtcatagcatttgtgaattcgctaagttatatgtatgataacagatattttgcgctaataatgtcaaaatttcttgtaatgattgggattgattctaatcttcttcttatccaaatcgatttttgagaatctcaaagttaagtttcctagggtctttgtagggtgtcaaagcaaagatcgatagttataacctagaaaatagtcgcccacataaaactatgtacaccaatgtaggggtaaatgtgtaacacgtggaagaaatccagattgttacttatgaattgtaggatgaaggtatggggctaaatgaaatgttttttgttgcttggagcattgaaaaattgccttcaacttggaaggattttaagatctatctaaagcatctacaagaagacatgtctcaagcaattagttctcaatcttcgaatcgaagaggaaaatcgtaagaatgagaattctgagttttgttctatggaatcaaagccaatgtaattgaaggaaacaagtccatattcaaggtcttcaagaagaacaataacggtaagaaaccgttcatttcaccaaagggttttaacagcaagaagaagccataagatgttgttggatgtatggaaagcctgaacatacagccaaggactaccgccataagacggaaaggacattgtttgagatgcatgtaacacaaaccttgtcaaaatcagtttgttgcggtcgattcagaggcaaaaatgatgacaaactctaatgattggtgggttgacacgaagcatgtgtgctcttacgggagtatgttctcaacgtacaaacaaggttctaatgagaaaaacttatcatgggaaacatgagcaccacgacgattaaaaggaaaggaaaaatggttataaaactcacatatgggaagaaattcacactcatgaacgtgttccattatcagtcactactcgcaaatttgtacacgaaacccgatttatttcataaatattacacaacaagttaccaaacatttataagttttatggccaaggcctagcacaaaactactctcggttcctattgtccatcacgccctctattccccactacaggtttcctgcaaaacaagtagaatcatgagtaatgtaagattactcagtgagctcgggattccctacaacagacattagtttaccccaacccaaatacccaacatggaacacgcaacagagaatggcaacgtaaggtagattgccgaagcaaattataaagcatgcaaatgcattaagactccagttttactaagttttaaagggcccgatatgctgccttcaaaaacaacaccaaacacacacactcccgtgatttcctgcgttacaaccacaaaggtattcaaccggagcatcactaccaaacgctacaccgtcgtgtagacactcggtcagggtagctagccccgtctctccgagttcttcgcactacatggcgatcaagtaacaacgttacaaaaccccatgatagcacggttcactacgaaggtcagacatatcacgatcgtggcacgcttatggtctttgcctcctaccacaagcaccatgtaccaagaccccaaagtttaagatattatgaaacatatggttcattcaaacacatagaatcatcaatatcccaacacaatctctcaacaataaacaatagcataagaatctaaagatcacatatgcaatcggatataaccattcacacgatccatataactcacgaaatcaatcaagaatgcatgagaatatgattatgaaactcaaaccattatccataactcactcagtaaccaacagaatgcgtgcaacgattcgggcagagttttcggctacaggaccttaacttgaatcggatggacggttttcactcggcagcctctcacttttgctcactttctcttcacaaaacaattggggttgagttggtcttatataggcaaggcaatggcgagtcagcatgtccatgtctcaggcgcatgggcatgtcaaggaaagttcatcgatccgcccgtggtgacacgctcgtcgctctagcggttgagcgacacgtggccacccaaacttcggctccacgcaactcaaattcggctccaagcaactttgcttgggccccaagttagccgagccacccgtccatggcgcgttcaaaggtccggtggggcaaacttcgcccacggtacacccgatcttgcccaaacttgcccattcgtgcccaaacttgcccatctttgccctttgatttttcattgtgttttgggcacttaatgtcaattggccatgcattcgagcaactttctaaaattcggactcttgcccgtggccaatgtccttatgcgggtaactacagggtcgcaaggaacgggcaaccttgaatgctacgcctggaccatcccccggaagcttaaccccacaaaaatttttgttggatccgatgtcaactctaccctttattggacgattaacctgaacttaattctttatcataaagaggtgttagatcagggaaatgagcatatacattaaggacttcttatcccttttttgtggttcatacccttaaaccctatcctcttttcaagcctcatgcattctcatttccctttttcatttagcaaatatgtgcaaaaacgtcagagagaaaggaacaacacagtttcccgccacaaagacagaagaaggaagcaaaagaagagattttaacaaacggcctaagagtttattcttccttggaaccaattcaaaggtatgcccattagattcggtgtttaatagttctgtttccccttccaaaaaataaattaatatatatatataaaaaaaagagaagaaagaaaagaaaaggaaggaaaggaaacataacaaccaagagagtaacgcccccgaatcgcctatggccggacaagccatgggcgacccagttacgataactgtgaagatgaacgaccacgacttagtagaggttccagatgaatccagtttcttaaccaaattataatcgaccttcttcccactaggaacaccacttaggcttgccacaccacttaggcttgccaaccctcgtgatattctagtgttgagcgacccggactaggtcttatatcattaaccactcgactgcttttaagaaaacactttatacatagtatatagcttatgctttgcaaagagttacccaaaaatatatctttgtatcggatccttgttaaaatttacataataacaagtaattttgtagaagcaacgcaaaatatcctatttccggcatttcctagtgttcgtcttcccgctatggtcatcccactatggttacctgtaagacaataagaatcatgagtaatctagcagtacttagtgagctcggtctatgcacaaatatatctctagggtttaatcaacttaataagtaaacttagccatcacagatcacaaagcacgtaataaacgttttatcatatacttataataataccagaatatgcagccaaactagacacatgaatgaacattgggcccagcatactgccaaccttaccaaaaaggtgcaccacaacatcaacacaaactcccgcataagtgtttacgtggtctccacacgtatgctactacacacacgtacatgcacacccataccacacgtacgtacacaactgtgaacacccgagctatagccacaaaggcttataaccggaacatcattttaatgcatcgtcatgcattacctggcatacgctccgagtattgtaccatcatgtaagtgaccactcaagatcaaaacttattgacacaattacaacacaaaaaggaaggcaacagcttactctaagcatgattgtattaggtaaaccccctgaataccacttagacacaataacctcatgcagaactatatataagtagtttaccacaccctaaacaagtatagacaatcaagtaccaaatcacgtattaatatatgtacataatataacaaggatctaatcacaacctcatagcatatatcatataagtataacaatataacaaggcaagtaagccctcgaatcatatctcaattcatcaagtaaacttagttaaatctgaattcacttagcctagtcaccagtccattccattccttagtgatattactatcaagttcatcaaatgcccatattgactttgagattcaagttctaacttaagccgaattccgattagttaagtctaagtgagtaagcatgcatatgatctaaagactagctctagaaaacatgcaaacaaacacacaattcgaccaaaactcacagattcgatagttcggaaagttttctaggtctcaagcgaaactcctcgatcacggtcgacaattccttactcacggtcaagttttctcgaccaccagcgatgattctctagtcacggacaatgtttcctccaacacgggcgacgattctctgaatttgggcgagtttcttgatttcacacgacttattagttggacaaccttacaatctctctctctcgccttcaaaaatgaaattgggcggagagagccatatttatagtccgcccaaggttggccagactgcattgtccgctgccacatttccggacagctgccgcgcccataggcgacaggtgtctcgggtgatggcgtggcgacacgtggcgaccaatgtcactccactgccccatcagcttcggcttcaagactcagccaactttggctccaattttggttacttgagccgcaaggcaccgcgagtgaggtgtcctactcacgtcggttccgcggccggcggggcaaacttcgccgcggtacacccaacttttcccatctttgcccattcgtgcccattcttgcttgttcttgccctttgatggtttggaaccgtttgggcatatgcggtcaattggctttgcattcgggcaaaattttctcatttggtcctttggtcgtgcccaatgcccttatgcgggtcactacaaatagagtctagtggcatagttccaatgaaagacatggaaacctaaaggagaaatgagccaagagaagagagccccctcggaaaaacctaagtctgggggaactgaaagtaagaaaaaagtaaaggagaagaaggtgtttaaaagaagaagtggttggaaactgtggacctcaaccgatccgttctctcttgcggttttgcaacatatatttcattcgagactatacagtaaccctaaacactttaactccaccacttaaacaccaaaagcccctttcataccaagcgctgtctaccccgaatgacaccctctaatgagaaagtcaatgccaaaacatttaaagaatgtaaagtgttaattgacgtgaattcagagttccgcaggatcaaagcggatggacaaggacgagaaaggcataggactatcgagcgctcgttctaacttaacttttgtttaatgtggtctgtaggatatattcgagatacggtcattgataacaggagagttcccgcgattttcaaacctctccaccagagttgttcttttgtttgcttggggacaagcaaagtctaagtctggggagttgataacacggctttttagcccgttttagctattgttttcttatgtttcagagagcatttggtgccattctagggccaatgagaggagaaacacgtattctaggtgccaagaaggttttaaaagttttgaagctaaaagtatcaaaagacgatcattctagtgcttcggaagtttagcatccggccaaggtattctcgaactcggtgtgaagattttttggaatagagggaaagctataagagtcaagattcacgtcgaagtcgaatcaaagcaatccatgaagccgtctggaagatatggcccgaagagtgaagacatgtcaagaaccggctgtttggaaataataagtccaaaacacatccgagcgatgagacttgaatccgggcagctccgagtagctcaccaacgactactaggtcacgcccaagtctttccctttttgcgccaccaccattaggctccttccctgaagcctactacacggcccgatctcttaattatccagcagaatgacgttcttacccctaaacctaattcttgggcctcaagtataaatacttgtccttagccctaaccctaggtgtgccttcatcaccagagaaccctagccgtcgccaagagctgcctcctagccgtcgcacctcttgaagcttgaagagcaccatctctctctctttttctcgtttttgtgtaagactctttaaggtggagctttgcctcttgtattctacgtttaaagaagtaatctctaaaccctttttaagttttattcatattttagttatggtttactcaaccaaacttttgattagctcctttgccatgatcgagtagatctctagttgggtttgagggggtttcaaaggggaattcatggggactagtagatcgaaagtctaggttggcggtttctatggttttgtttgatcgtttaaactattctttctagttgagttgaatcttaatgcttgtatgtctggaacatcacctagtacttgaccttaggtatttccatctttagcaaaatctcggttgaatgcttgacctaactcaactgaataaagaactataaccgttgcacacccaccgagtgatagggacttatgggctagaatcgaatttgaacttaatgctttgatcttgtattttgaaaccatgttagcgcatactaaccgatagggcaactgagtacgcaagatattagtgataatagccggctttcacctactaaccgttagggttagctggtcttgatagagtttcgtatgtccgagaatttggaagtaagcaaacctaaccatgttatcacctagattgagatctataccttatttattgaaccatgacatccggagaaacccccgatgacctaacgcttctctcttattgcttatcgtttagtttaattagtagtcttttagtttagttactcatagcatacaacaaccccctctctttattttggtcctagcttcactctcttcttaaggatttctctgaactacttctctcattgtggattcgatcctaaaatactactccgatatattgtgcacttgcagtagtcgtgtggtttttcaggtaaaaatctgaagcgaaataaaacacgcatcacatgtctccccatcaataaactgtcaaaactttccgacagattctaaatattcgacaatttgtcagtaatttccaacgcaactccgaccaagttaaattcgcccatatacttcgatggatttccgacccatcgaacatccgtcagaatattctgcatctttttgactgaattccaacaaaatatacctggtcatatagacgtgctgtttatagcccttttttaattaattagaaattcgtcaaaaaatccttcgaatactcatcggaaacgttgataattctcatctttatattcttctaccctcattcacaaaatcatccaagcaacaaaatctaaccagatagaaatggcttctttgaatctgtttaattattttcgatcatggagaggccagcccatgcgtgatcccaagatggagttaattacgatggaatatgcagaaggtcttatacaattcatggcatttgcggcaaactaaccagtaaccattgaatcaaaacaaatgtattttccatgttgtacatgtcggaatcttagagtttttcatgtatctcaagtttggatgcacttaatggggaagggtttatgccaaggtacaaagtttggttcatgcatggagagaatgagtcaatggtgaattatggaagttgtagcgaacaatatcatgttgacaggttagtggaagcaaatgcagaagtagatgcaaatgcaggtaccgtttagatggtgaatgatgcttttcgtgaaaatgtacactcgtttgatggggatagtgatagattagtgaaacctaatttagaagcacaaatgtttcttaatatgttagatgcagcaaaacatcccttatataaaggatttttaaaagatcatttgcctaccaaattgatgggtatcaagacgaattataatttgttcgagaattgtgtggatgtgattactgatgttgtgaaagatttatgacccgaagataatcttgcatcgggaacgtactacgaggtgcagaaattggtagttggtctttgtttaccgtatcaggtgatagatgtgtgcattgacaattgtatgttgttctagagagaagattcagatcgcttgacatgtaagttttgtcgcaaacctcggtatcaagaaacaactggaaaagttccaattccatgtaaacagatgtggtatttaccattaggagagaggttgaagaggttatatcaatctaagcgcacagcagggccaatgagatggcatgtagagcacacaacagaaggagaaattatacattcctctaatgtagaagcgtggaaacattttcaaacagtgcatcctagttttacttgcgagcgaaggaacgtatatattggattatgtacaaatggattcaatccccttggaagcatgggaggcagtactcattgtggcctgttatcgtaacacctaacaacttgccgccatcatcatgcatgaaacaagactttgtgtgtctgactatcctcgttcctggcccaaatcatccaagaagatcactcgacctgtttttacaaccacttatataagagttacaaatgttatgggagcatggtgttgaagcatttgatgtttcatgtcaacagaaatgtttcatgcatgtagcacttatgtggaacatcagcgacttccctgcatatggtatgttatctggcaacgcatggaaggttatcgtgtccgtattgtcaagataacactaatacattccaattgaagcacgtatgaaaaacttgttggtttgattgtcatcagagatttttaccgtgtaaccatccgtatcgttgaagctccactttgtttacgaagaacaaaaaagtggttgatgggccacatccagggttagatgacacatattcgctaaatcaatttcgagattttggtggagctacatctgttgaggttggtggtaatgggtatgatcttgttgatggttatggagttaatcacaatttgcataagaagagcattttctgggaattgccatattggaaagatcttttgttgagacataatctagatgtcatgcacattgagaagaacatgcatgacaacttgatgaataccgttttaaatctgcaaggtaagacgaaagataatttgaagtatagattagacttgccagacatttgtttgaggaagaagcttcataatatggcaaatggaaaagaaccaattcctgtgttccggttagatgcgttctcagaggaagatttttttattggataatgcatagtgttaaattttcagatggatatgcatctaaccttcgtaattgtattgatcatggggaaaagaagttttcaggaatgaagggtcatgattgtcatgttgttttgcagcaactgcttcaatattatatgtaaaatattttgtgaaatatgactctagtattatttttctttaatttgtattaattatttgtagagttgaagactaatatttttattagatcaaattttttttgaatccctttattattaaaagggaagtccaaattaaaattttgtctaatttgacctcaattttgatttcaattttagattttcttctttgctattcaaaatcattaaggataatttggtcttaacaatctcctaaactttatatgatccgattcaatctaaaccgttcaataaaattaattttcttcaatctaaaccgttcaacaaaaataaggaatctatgtagttttgaaatcaaaatatgatcacattatatccctaaaaacactatattcaatcgtgaaatcaataatcaataatatccaaatcatatattacgattcttcattaatcactagaaatttatatttataagtttaagatatcaagtttattcaaatatttagtataagaaccaaataaaccgattgtccgcggtaaaccacaggttaaatcctagttgtttttaaacttaataactgttttctacttgtaattcgtttagaaagattattgattataaagaataaaactaaatgtcatattgaattgttgtacaaaattaaaaaatttgtaaaaattattaatttatcgacaaactaatacctctttaaattaataattttttccgatcccaatattattaatttatagtggttttactataatatgtatttataattttaatatgatataatctgttaaataacaatttttttatatgaactgatatgcatgtataggcgcatttttcaagcacttatgtgtgagatcactcacgattgatgctattcctaatttggagaaaaagataccaattcttctatgcaacttggagaagatatttccactattttttcgttgatttcatggaacatttaccaattcatctctcttgggaagcagcacttggtggcccagttcaataccgatggatgtacccattcgagcgtcatatgttccatttgaagaaaaaggtgaaaaacttggcacgagttgagggttctattgttgcctaatgcattaacgaaaaaacctcaaatttttcagaatattactttccttcacatgtctaaacaaagagttgccgacatgcacaacccaatgatggtggtgagaaaccatattatccactcgacattccaaatatatttgaacaaaatttggcaactaagagaaaaattcaagaagcgtcgactaacaaaggaaggagtatggtcacttgcatgtgtatgtgcttacgaactacaaggaagttcttgaattcgagaagtttacaaatattttacttaatagttcaataaaatattattaatatatatatatatatatatatactacttaattgtccaataaatttgattaaataatattaattttattttataggattaacaatgctcaaatgcgatatgaatatccacatttcaaggaagatgaagttgaaacccttaaacaaagcgagtttgcacattggttgatttttatttaagtttttatttaagttttatgtaagtttatcattatattaattgattattaaattttatattaaatatttaggttagatgaccattctttttccagataacgactggatcttctagaggtcaagtatttccaatttggtttcatgattcggtgaaagggccaatttatattacaaagtcatatctgatgtattgcaatcggagatatgtgttttaggttttgtttaccaagaaagaaatagtgatcttgtgtactatggattcaataatgcgtatccgtcaaaaatccgtcagcttaatcattaccgataaaatataccaacgtggcatattatttcctaattttttatgatattcgtcagtttaattgttatcttcgaaaagaggtcggaaatttctgacggtcttccgactagtcagggtttagggtaatgataatgtttaatttctttgcaaatttgtggcacaatagtaataaattcaagaaaacttcgatttttcatcaatttctatctttacaatagaagcacataagtcttttaaaacttcaagtgttaagtatagtgtattctattgatcactagtatattagtgatgtgttaaatatattttaacatttgaagtactgaaatatgtactaaactacatctaattgacttgttaagcttgtttatgtgcaatgaataaaagtattttaaaatctagtctcaaacccttaacttgtcagaaatccatcaaacatttcttgcaattttttgatgatgtttatattaattttcttagaagatttgttgactaaaactattaaatagcatgcaaaataatattttctatttccgaaaaatttgcaagggttaaaggtttatccgttgaaaaattgtcgggaacaaaactttacccgcaaaaacaaaaaagttatgaggcaatattttgtgggttccgacggatttccttctatatttgccgtcggaaatattttatttattaccatcaatgttttccctttccctttcatttttaagcttcttcacccttaaaatcccctctcatatctctcaaatcttacttaatatccctcaaatatctcttaatattttttcaaatcttcaattctccatcaatttctctgaaatctcaaatctcaactcttcctcaatctgtttcaaatctctctcaatctctccaccgtcttcctcaaaatctcagcaattatgtaagtgaacattctctaccattttcaattagtgttttagttatgatttgttgaaatttggatgcttagattgatagatttagattgttagtgataggtttaggttcatagatttgaactaaatttaggatgtttggacctcaaacctagatgtttaggtttttagatttggatgaaaatttcagaattctagccatttaggttgaaagatttgttaattaaacaaaactaaaaattaagtttgtaatatatttgcaaaaatatgaaacattgctacaaatttagaatgatatatttagaatattttttagaaatatttaataattatgtaaaaacaatttatgacaacatttaataattatgtagattaacttttgctatattatgataaacgatattatagaaaatagattttaaccaaacaaatggttatgattaatactttagatgtcttttatattttctatttaaaaataaattttacttgatatttattttactatgatacctattaattttttaacattacaaatttatattttattaaactgtgtactaatattatttttttatttgttagggttttttaccaaaatttttgtacatttgatgctcgatccaataatcaggcgcactcgacaacactatcaccatcgtccattcccgagtcgctgcagtcaacaaacggggcagacacttcttcgacgactccacccaaaaaggcttgaataagagagaacatggtaagtaaattttgctttctttttataatatataaagattttaaagtaaaaatcatattatttctctctatatgtaggttaggttattctaaaaatagcatatccaaatcgattttatggatgttgcatgggatgctcaaatatccttatccggcatacaatgatatgcctggcgacgatcaagagctttggtttaggaattttgtggtaatgaatttattattacgtaccattattttgttttatttactaacatcattcttttagtttgtagcatgaatttaattgggatcctgtccacacaccctctgtacgtgttgcgtttcacaagtatgctgcattaaaacttggggaccacatgaacacttggaagggaaagtgggaagtaggcaaggagtgtccaaaaggcttgaacccaggcgtatggcctcgcttaaaagagtattaggcattgccggagactgcttgtaccgcaaaaaccaactcaaaaaaaccagaagagcgaacgtggtggcaaatgtatggcggtgcacaatgcatgtacttaatagagtttttgttatatatatagttttaaggtcattgtttagacctaagtttttaacaaccattattctagcttttgatactttggagataacctattcatacattagatctctcttctcagagtttcatcagatatttcaataacaatgaatagatcttttctaactcttttcttcttattgattttgtttatgctttttattcgaacatgtcttgttattcaatgatcatgtatgagtagtttgcttgtaagggttagggttatatatgatttagtagatctcccacctgttaggatctgtaggattcttcatctttggttattctttatgttaattctagagtagctaactagaacttgatcttaaataataagtatgcccaaaaaggcatctattaccagaattactatttgatgagccgggtttataagtgtgtaataagaatcggcctatctacttacgtgaacatatcaaactcgattagcatgcatgtttaggattagggatttgccaagccaatgctgggaatctttagctttagacatagggagtaatgccaagccaacgctaggttactctataatagtggtttgagtttaagaacggttcgataacatcctagcaactattagatctattaatcatcaatttccttagaatactctaagcctaacattttttatcatcttattttacaaccccataatctgctatttgtttgcttttattttctctttattttcttatctttgtctagcttgatcttgatacttatgcctattgtgtgaacaagagctttgtagaattcgaccataagtactaaagacgatctcttttttttggggagtaagctttaaggacagtttgatctatactagttgtcatccaacgtccaggcccgagaaaaagatcaaccgcatggttctcgaggtaaggtttgtttcataacatacactcatgtacaagaaattctgtcaaactggggtcgtgtggtaggtgtaggtagtctcaactaaagcacaaaatatttttatgccggcccatcacgggattttgatatctttgcagagcttgaggagaaagacaaggggatcttagctttgaaggagaaaaacatgaagattcttgacttcatgtgttcaaaattttctgattttcttgatgatctataaatgcttttgaataaatttaattttgttgttttgtcaaataattttattttcttttgtaagataatatatgcacttttaaaatagcttatcttcttgtagtgtataaggttgtactcaataaaagtgggatatatgttggaaaaggctacttatgtgatggtcttatcaaatagcatgttgaaccgatcaataataaaaatgcacgtaatattgttgcttttatttacttgcttgtttcaaatgatttatggcatggacaaatgagacatgtcaattatcattctttatatagaatgatgaatttaggattgttaccaagacttcatatacgacaattaatcccccaatgaagtctattggtagttaggaacttttgaaaaaccagatctcactaaaaacagtaatacccaacggtcctcctccagaaatggtaatgtcaactggacaaagacgcgattccgacgacttttcgttgacggaatcatttttctccagcgtagaacaaagcggagcttccatcccccattccctggtagtgtctctacttcttctctctgattattgctgtgtgtaaacttattcaaactgttaagcctgttttccttatccttacctgcaacctaacccataaatccattgttgactgtctctaaacccctgcattcatggataaaagaatcccacacaacctaaaaggcaaaggtattgactagggcttctctccaccagtttgcagaagaatccgagcaccagagttagatacaagcttattgaagcaaactcactcactctaatgggccagttaaccaatccgtctatgcaaagactatggtccctctttcccttcctctcaaaccgctggaacctgaagggcaaagccacagggtcagatctgggcagaggatgcttccagtttagctttgattatgaggaagatacgcaaaaggttttggataataggccataccattatgaccagtggatggtcattctccaaaaatgggaacccataatctttgactcttttccttcaatgatccctttctggattgacattcaaggtctcccaaaacactactggcaacatgatatatgctcaaagctattggctcagagctgaaagaaattctagatatcaaaattaccaactcagcagccaagataaaggtttctattgatgggctgaagcccctcattctcgacactatggttgacttccgtgatggcagcgaggctctaattacactagagtacaagaatctcaagaattactgctctcactcattgagactcacccatgaaaagaaattctgcccaggattagtaaaagagaaggaggtctctacaaaaatcgagcctccagtgacagttggggattctaaaggtctggtcagaaattattatactcctaaagataactttgctgcccctagagagatgagagatcccactcctaacagatcactctctaaagatacttctatcaatcagagtcttcaggcttatacctagaaagatagaagggtgggtcgaagctcttctagagaacacttccccaaagaaaatggacgctatgatgctagaagaaacataaattattaccaccatgaaggaagaacctcagcaagtagagagctaaggcatatgagagttacctcagggactcaggagttttctcgagagggtccaagaagagggtcgtccaatagatcattcaactatgacaacccaaattaccagtggagggcacgagattcatccagaaacagccctagacatgacagttaaaaatcttggagaacacgcatgccacctttggagagacctcttgtttagttttgataagtgtgcattttacatgttttgagcatccatttgttatcactattgcatcatatcatcactgttttataccatttctcatcatttgtcatcactttacatgtttaggatatgtttgcatatttgtgttgtttttaggtgatttggagctgttaacgagctaattggaagaagcggacctgatcatgtcaaaccactcaaccccctggtcaagtagatgcttcacgacctcaacagaccacttgaccccctggtcgagtaccaccatgagagtcactcgatcacatcactcgaccacctggtcgagtatcatcacctccaccacctgaccatcactcgatcacaccacttgaccacaaggtcgagtatcttcatcaccgtcactcgatcactctaccaccaagtcgagtaccaccatctccatcattcgacttcatactcggttgccagcttcagagtcttctccattccgcactcaaccagacacttgagcacaaggaagaaaagaagactccagcttatcactcgatcattcactcgaccatctgggtcgagtaccgtttttaatccgtcccaatattgcgtcgttttgagtattagggtttcggaaaatttcgctataagtagcatgtactttacattttcgatgaaagagttttattctgtagacactgtgttcttgacatttttgtaatccgtatttctcttaatctattcagtattcagtttttgcttttgatttcgtttactgttgttcatcctgttatcatcatgctataactctgttgatatcatgttttcatcctattcaacgtttatgctttctactatgatgtctgagtagtgactagatttctgaggatgggttagagtagtttagaattctcagaatgctaggtggttgagtttgatttatagatcccttctggattagttgttcttaatgcctattgctttctgatcaactggaatttgagcccagacatttctacgcccaaaaggtgttcgataaaatgtctaaaccactaattccagagattcgtggctctataccaaggtattggttgcagggagcgttttggctttaacttgttgattcgtaatgcctataaggttagctctcgtcaatggtgattaagtctgggactggtttaacttgagggtctctattgcggtggtacttagatttggttactgaacttgttgtctagggataatttgttgagcatatcaatcacctgtaaactgaggaaacaaaactactcaattaccccatcctcgagagttctttatctgattgatttctttgtttactctgctgttttttactgcatcttgttacttgttgcttagtttttgcatttctgtcctgttactcgacctgatactcgaccacctagttttctggcaacagactgtgcagtcgagtagccctgttggcaacaagctgtgttggtcgagtgttttactgtttctgcttgaatttcagtttcctgcatgttcacttaggacggctagaaactccaaaacctgttattgcttggtttgactctgtgaactctgattgcatcttgattgttagcatcacacccatttggattgacaacctaaaatactacaacgacatgatagtgctttaagtttaattgactaaaaacttattatcaatttggcgtctttgccaacacagcttgggggagttgataagtgtgcattttacatgttttaagcatccatttattaccactattgcctcatatcaccactgttttataccatttctcatcatttctcatcattttgcatgtttaggatagttttgcatgcatgttgcatatttgtgttgttttcaggtgatttggagttgttgacgagctaattggaagaagcggacctgatcatgtcaaaccactcgaccccttggccgagtagatgcttcacgacctcaagagaccactcgaccccctagtcgagtaccaccatgagagtcactcgatcacatcactcgaccacctggtcgagtatcatcacctccaccacctgaccatcactcgatcacaccactcgaccaaaaggtcgagtatcttcatcaccgtcactcgatcactctaccaccaagccgagtaccaccatctccatcacccgacttcatactcgattgccagcttcagagtcttctccattccacactcaaccagacacttgagcacaaggaagaaaagaagactccagcttatcactcgaccattcactcgaccgccttggtcaagtaccgtttttaatccgtcccaatactgcatcgttttgagtataagggtttcagaatatttcgctataagtagcatgtactttacagtttttataaaagagttttattccgtagacactgtgttcttgacgtttttgtaatccggatttctcttaatctattcagtattcagtttttacttttgattccgtttactattgttcatcctgttatcatcctgctattactctgttgatatcatgttttcatcctgctatgacgtctgagtagtgactaggtttctgaggatgggtgttggagctggattcccctccaggaatccacctgcgaaaataccaaaccagcccacaaaagcccaccgagtagaggacctacgcagctgatgagcccacatacgcgaatgggtacttgggccagataagcccggtcacttgatgaagggagataagcgaataacaacctaggaactgatgaggagatattcgcggagcggacctgatatctcggaactgacctgccgaatattcaggagaatctccgcagatcccggacggagctaccacgtacgtagacctatataagggagcaaggacgacttggaagacacattcaattcagctcacattcacgcacatacttttacacttgtaatctcctttcacattgtaaaagcttcatcataatcaatacaaaaagtccattcgttcttagcaatataactctcaaggtttcagtgaagttctagccctcctttctcataatttcaattacaaatctctagtgtggatttcagaacccacaatgggttagagtattttagaattctcagtatgctaggtcgttgagtttgatttatagatcccttctggagtagttgttcttaatgcctattgctttttgatcaactggaatttgagcccagacatttctgcgcctaaaaggtgttcgatgaaatgtctgaaccactaattccagagattcgtggctctgtaccaaggtattggttgcagggagcgttttggatttaatttgttgattcgtaatgcctgttaggttagctcttgtcaatggtgattgagtctgggactggtttaacttgagcgtctctgttgcggtggcacttagatttggttactgaacttgttgtctagagataatttgttgagcatgttaatcacctgtaaactgaggaaacgaaactactcaattaccccatccttgggaattctttatctgattgatttttttgtttactctgctgatgtttactgcatcttgttacatgttgcttagttcttgcatttctctcctgttactcgacctgatactcgacccccccaattgtctggcaacagactgtgcagtcgagtatccctgttatattttctatctgttactcgacctgtcactcgaccacacccggtgcttggcaacaagctgtgttggttgagtgttttactgtttctgcttgaatttctgtttcatgcatgttcacttaggactattagaaactccaaaacctgttattgcttggcttgactatgtgaactctgattgcatcttgattgttagcatcacactcatttggattttctacctaaaatactacaacgacatgatagtgctttaggtttaattgactaaaaacctattatcacctttgaggtcacaccaccaccgccacctcctatccctacaaatgatcaaatcatgggagacctcagagatgctactctccaatatgtgagatgtgcagatccaactgaaagtgcagcaagaaaacgcagaggtatccaaggggaagagaaaggtctcatggctgaaacagcctcaattatgttggaagctgttattgtctcaaaccaaacttaccttacttcagaagaaacagacgcccaacaaactccctcgctgcacaagtactctatgctgaaccaagatctgccaattcatccggctgaactgaccacaatcattgctgctcctgcaaaaaaaagaaaaggagacatccccccctaaataaatcccagaataaaactttattaccccaactaggatcaaattcaagcaaaagaaacaaaggaataattcaaagttcccccaaaagaaaatccacacctgagaagaataattcaaattctcaagagcctgcttctactagcagaaaacctaaatcaaagtaaaagttgtatcttcaggcgggtagctcctttccctcctcaagtcagcctaatccaagagtgaatcttattcctccaagagtgaaagagaaggtggaatttcaacatccaccaactcagattccttaaaagtaccgaggtggaactattgtgggttggggaaccccacaacaggctagcgtctgcgtgagattcactccaaaatctcaccagaaatcttgttcctcatggagacaaagaatcgtgatgacttggtccttacctctctaacttgaatgaattaccattcacaccatcttgtttccccacacagcccaggagtaggtggactggacctcttttggaagcaagaagtggaagtgactattctgacttcctccacaaatttcattgacacacatgttaaagctgcgaattattttttctttgcctctttaatctatggtgaacagatagagcaaagagaagagcaatttgggagaaacttactattgtagggaaagacacaagtgatccctggtactttacaggagacatctcatttgaaaagcaaggaggctgtaacgctcgcgatcctcaataggatcgttggctgggacttggtccgaggaaaaaaggtggagtctcggacaagttgggaaggagctggccataagctcggacaaagggatatcatgcagactaagctaggatcgtaagagaatcagcagggtcagctcatccgaagctcaagctcagctggaatgagtgaaggttacttgggtcaagtgatagtccagttcgggcagctagatgagtgacggttgagctcgaggtagctggtcgactgtccgaccagctaggcgtttatggggacggttacttgaacggttatggtcgaacggttgctcgcccaaaggatggataagggcgagcagttacgggcggagagatgcaacttttcggaaaggtgcaaggaatggatgtgatgcttcgggaagcatcccatcgtaccctatataagggagggcgtccaagacctttggaatcaccacaacacagagaaaacaccaaaactcaccattaaactctcgccctctcgggagaataaatcgtcgaaggaatcggtagccggactatggccggcgaaggagaagaagggctcggcataactgaaaatcgtgaaggaaggtaaggaatcctagaatttgagagtaaggattctaggatgcgatataggagtcgggatccttgaaaggatcgactagagggctgggtagtattcgggtcatgtgcaacctacataagactcagttcgggcgaggcatcggctgaggcggggatgcggctcggcggaggattggcgggtcttagagatcattgcaatcttccccactctgattcctctctgcggatcgagtagtgtaaggattagagagcattgcatggacttgcatattactaagtgaacgagagtacttatggctctatgaatttcaggaactaacggtgatcgtgggaaggacttggcttaggcgcaagagactcaaggccgggatgatgggttgtgatagttcggatagtctagggatcgattatatgacttgtaatagcttatttgcaaactcataagttgtatcgaatcctttactcaattaataaagtatcttattgtttgtttactctatttgtctcaaatattgagtcagaatcatatgaaacggattacactagcgaatgaacctcataaatggttggggtcaggtcacttagtgatttgggtcgagagatcttgtccagacttaggtagtctggatcggggccttttagaggcccaataagacatgaaggcacttcctttatggcggaatgtgacttatatgacttaagacactcaggaaatttcttctcttggcgtggaaagaggcatgatcatgtggtgcactgctgtctaaatcgagctatgtcaaatggagcatgggctgaaacttaccctgcaagttgctgtgcttaccttcgctttgaaggatctgaccatatacgacttctcactcactttgatctatcaaagaaaaagaaaaaaggagtgttcaaatatgacagacgcttagagaataatgaagaagtaacagcccttatacaagcggcttggaacctatgtgatactggggatgtgaaggaataaattaatcgatgccgcttggacttcattacctggacccaagaaaagcaccagaacagtcaaagacttattgaggaaaaccgcaaaatttgaggaagcaatggctagtcaagaacacaaccatgacctgatctctaccatcaataacaatcttttcctggcttacaagaaaggggaagagtattggaaatagagaagtagacaattattgcttgctttaggggacaaaaattcgggttacttccatgcaattactaaaggaagaacactcactaataagttctcagttctagagaaagaggatggggcacctatctatctattaagaggcaggaattctgaaggttatctctaagtatttccaaaccctgttcactgcaaaagacggagaccatgttgcgacaataaaagaagccattaaaccatgtatataccctgaaaggaaccaacttctcatcaaaatgccttcagggaggaaataaaaagatcttgtttctctattcatgctcataaggcccatgtccctgatggtttccccaagcttctttcaatctcactgggagactgaggtccaaacattgtgctagagattcagtcgttcttttcatctgccaatctgcacccaacaatcaaccaaacaaatatcaggcttatacctaaaatccaaagccccgaaaggatggttgattacagacctatagcattgtgcaaagttttctacaaaattatctccaagttgctctcaaggcgtctgcaaccggtcctgcaagatataatctcagaaacccaatcagcttttgtgccaaaaagagcgattaatgataatgtccttattacacatgaagcactccactaccaagcatggataagctggatatgcaatgtgtaactactgttacttactcttttctcctcaacggagcggcccaaggttcagtaactccggagagaggactcaagcagggagatcctctctcaccttacctcttcattatttgtagtgaagtactttcttggttatgcaagaaagcccaacaggatggagtgctaattggtcttcgagtttcaaaaggcagtcccaaaatcaatcatcttctttttgttgacgacacgatatttttctgtcgatcagactctggtcaaatgattaacaaggcaaagtcagctatcactttttctgggaaaacaccccatgccatcaaattggaagctcagcaaatccttggcatacaacttacagagagctaggaaagtatttgggcttacctgagatgttttgtaggagaaagagagatctgttgaaccagatcattgaaagaatacggcagcgctctttgagctggtcttctcgcttcttgtctactacgggcaaaaccacaatgctgaaatctgtgctagcttcaatgcctacatataccatgtcttattttaaactccatgtctctctttgtaaaagaatccaatcggccctcacacgattctagtgggactcatctacagacaataagaagatgtgttggataccttggtcaaaaatggcaaaatctaagaaagatggtggactcgggttcaaagataccacaaattttaatgatgccttatttgctaaagtgagttggcggatcctgaagacaccatcttgtctcctggctagaatccttttggggaaatattgtaaaacaacctcttttctggattgtggtgtagcagcttcctcttcacatggttagagaggtaattgtacgggcagagatctcattaagtctcaactggagaaagttattggatcgggctaggacactctagtctggtctaaaccgtggatctcactttcatctcccacaactccaatgggtccaccaactgaacaatctcaactcatgaatgtgaatcaacttatctgcccgattatgaagacttgggataatgagaaactcagaagacttctgccaagctatgaattggagattctctccataagacctagcagggttggagctagggaccgaattgcttggcttcccactaaattaggtgaatactcggacaaatctgggtatcacgcagtggttgatctacagaaacaagcacctcaatccttagatcctcctcttggttttgactggaataaagagatttggaataagcactgccctccaaaagtataaattttcctatggaaagctatgaaaaatgctttacctgttggcgaaaatctgaggatccgtgacattaaccctgatgctaactgccctcgttgtggtgaggatgaatcgtgcctacacatgttcttcatttgcccctttgctcttcaggtctgggaacaagcaccattcaagacgtcactctcagcttctcgaatcacaagcatgaagatgggtttggaagtatcttgattgcttgtcaatgtcccgccaactggaatcgaacacggtctgctcttcccgtggactttgtggaatttatggacctgtagaaacaaattgatttttgagtagaaacatatcacaaccttggatctcatctcccaatctatttctcaagccaaagaatggttaggagctcagatccaagaaccgaaacctcaaatcatgacacattgatttgcttcaccgacgcagcttagcgtgaggattccctagaggctggatttgggtggatatttgttgattattcaaaccatactgaatcttcccacagatctgcagcgaagaacatcagttcttctcttggccacccaacacacttaagactcgcaacagctagtcaaagcacttaatggtgagccccatccattggagctccatgggattttattcgacctcgctatgatctctctaaacttcgatgcaatttcttatgcctttgttaagagagataacaacattaaagccgatgcattagctaaggctgctttgctttcaattcaccatgtactggttcacatttaataaaaaccaaccgatttgaccaaaaaaaaaaaaggattgttaccaaagaacaatcttagaagcaaatgtgaagtttgggtgaaataagaatattcataacactctaacaaatatgtgaaaaagtcaaacgtgttatttggtttgatacataatgacttgagtgattttcaatcaactccaagtcgtggagggaaaaatatattatatactttttatcgatgattaacactaaagatgggctttgaatctatttaagaaattcaaaggaaaagttgaaaataaattagataagacaataaagattctctgatcagatcatggtggagattataaatcaaatgaatgatttttgttgcacatatggaaacattcatcaaactaaaacactttatcctttgttacaaaaacagaggtaccaaaagataaaaatataatacttaaagagatgatgaattttatgttaatcgattcaggtgcaccacctaatctatggggtgaagctattctcactgctaattcaatcttgaataggatccctcataagaagaattctaaaactctatatgagatgtggataaaattaagacccattcacataaagtgtggagctgtcttgtaaaggtaatacatttacctaacaaaactattataggaccaaaaacggtggattgcgtgaacatcggtccttcggaaaatagtatagcctatagagttcatcaatctaataggcaaagttaaatatgaacattgaattaaatgaggcttagctctttgaggatgtgtttccatacaaaaaatgtagaaaaacaagtactaaacatgtatgtgagacaatgaatgtgcctcaaagattcaagaacaagaaaatgaactaagaagaagtaaaagagcaaaaagagctaacgattttggaacggactttatgacatatttgagtgaatatggatgtcaaacataaaaggctgtaatcgagtcatcatatgcaccttattggaaagagacaattaagagtgaagttgaatccattttgagtaatcatacatgggaattgattgattattgacataaatggatattcacaaagaagtgaagaccatatggtacgatgaaaaatataaagcaagactagtggcgaaaggattttgtcaaaaggatggtcttgatttctttgatacatattctctcgtgactagaatcccttctatgagattcttaattgcagttcggccatatatgaactagaaattcatcaaatagatgttaaaacatcattctttaatggtgaactagatgaaaaaatagatatggaataatcctaaggctttacagtcaaagagaaagagaagagtatgcttggaggtttgaccagcctattttctcacataaccacatggataaaatcttagaacaaaatacggactttgcaaacccgtatgtttgaggcaaatgcctagaaggcaaatacttagttttcaaaaagcaaaatgaaaagtcctccttgggtttaaatataaggtttaaaagcctcctcgagcaaatgaataggtttaaaatagtaagtttgatagagtatgaaaataagatgaaacaagctccatttaaagtggacgcaaccactaagaatcaatattcatctctagatcacccaaggtagatgggtttggaagggttccacttttaattctttctcgttctagatctttggggtcaacaacaagagccggagtgagggggactttgggaggggtgtcttcaaaatcggcagctcttccttggtctaaattcagaaaaataaataaattactaataatcaatggaagtataaagtgatatgatcctatttttactgcttttagctatgatttacgtataggttttagagtctatttgttatttctagagtcttttctagtcattttcaggtctttacctgtttgagattcatttggagataatggaggattctagaggaaaacagagaatttatggtgctgaagaaatccggagacaaaaatgcatgtaggtgccgagcgacaccaatacttgacgacaattcaattgcgcaacctattgatgttttgaagatttccaaattcggcccataactttcccttattactaaagaaggcccatcacgttttagaaacttatatattgatttttatggtcattgtttagacgtaactcttattctctattctgtacttgggagcaaaaccctgtggagactccctttagagaagatctttctaaactctattcttttattgtttcttacattgatttcttattcgaacatgttttgttctttgataatcatgtctgagtagttctcttgttgggtttagggattctcaattagggatttggatgaattagtagatcgaaaactctgttaggataatataattagaattcttcatcttagattatttttaatgctagttgtagagtaattaactagaacctgattttaggttaataggtatgcccaccataggtatctattactggaactatcttagatgagccttgtatttgacgtttttcttttatttttctcgcttaccccgaatttgaatgccactagggacagtgtcgtttaagtttgggggaggcacttactaactacgtttttctttttgagtcttattcttactcttatttttcttattttcttgagtcgttttattgagtcaaagttttgtaaggaattatgatcttcattctttagattattgcctggttgattaatgctacaggttcgactcaaaccgactattgaaaaatctagatggcaaaccaacagtcttgaggatatgctagtttccaacacaacactaaggctggagctaatctcactgctcttccttttacctcttcaaacggttagtattcatagatctcgactccttgttcatacatgataatgagacccatgtgataaagaaaaagtgttcttctcccttgataaaaaataataataatgagagattaacaggattttcagatagtgtataggggtaggaatgtttcctatgaccccattattatacattatcttgaatgatcaattacaaaggttggaaaaatgttgatggtgtcgatccagtatgcgagttcccttttgtttactctctaaaaataataagtctggggagcaaaagaacaccaaggaaaaaaaaatataaagaatggtcgatttatcatggtatagtacaggaatgagtctaaaaggatcttgaatgttagcttgtttgatagaactcagcaatgaaagcctagtagatatagttgtggaacttagctatggaatctacaatgtttcgtaagcttgcagagaagtacatgttggttaggatttgattagaactgctaggcatatagatttggttagaatgatcatggcaatagactatagaatgttgggagtttctttgttttcaaacctcttccacgggttcggcttttgtgttttgcttgaggtcaagcaaaatctaagtttggaggagttgatataaccctatttttactgcttttagctatgatttacgtataggttttagagtctatttgttatttctaaagtcttttctagtccttttcaggtctttatatgtttgagattcatttggagataatggaggattctggaggaaaactgagaatttttatgcttctgaagaaacccggagacgaaaatgcacgtagaacttattgatgtcaagcgacaccaatacctgatggcaattaaattgcacaacttattgatgttttgaagatttccaaagttggcctagaactttcccttatttttaaagaaggcccatcacgttttagaaacttatatattgatttttatggtcattgtttagacctaactcttattctctattatgtacttgggagcaaaaccctgtggagactccctttagagaagatctttctaaactctattcttttattgtttcttacattgatttcttattcaaacatgttttgttctttgataatcatgtctgagtagttctcttgttaggtttagggattctcaattagggatttggatgaattagtagatcgaaaaccctgttaagataatgtatttagaattcttcatcttagattgtttttaatgttagttctagagtaattaactagaacctgattttaggttaataggtatgcccaccatatttatctattactcgaattatcttagatgagcctagtatttagatgcctgctagcgtcgattacttagacttattaaacttgattataatgcttgcttagttctagggatttacaagagagctgggatcaatactattaagcatagtaagtttcgcggaacaccaccggttagactatattagtgatatgagttctaggatgattcgataatattcctaatttactgctagatctactatttttgatatttcttgagaatttctctaagcccgacgttttaatcatctgaaccttcaatctcttttattgctttcttgtcttgtcttttattttataatctatttgtttagcttaattcgaaaccttagtctattgtgtgatctgagagctttgtgaaattcgaccctaaagtactacaatcgatctcttatttgagagagtggtcttaggattaatttgacccatatcataaagcaagttggatttataagtttagagccaaataacttaccaggtatagccaattcatgaccggtctcacaatataatagcaatcaagcaacgaaaactatgtaactaattgttatcatgatatgtaataagtaataaccaatcaaccaaagtaactttagtaacaagttaaacaacaaaaaagaaacacaacttttggaagaccgatataatattgggccttctcctcaagttagtctccacagtttgatattggaagactttagctaatcagctctaacgtatcttcgaacttttctcattaagagtgattattcccctgattgttgtaccttagtacatagagttctaatttcccatttctaaaaccataattttttcttttccgtctaaacacttattgtattaatttgaagaatcgatatacagaagttctttgagccaaagaggcggagaaacagaatcagctaagaacaatggttgattataggttaatctagctaagtgatgggttaccttattacattcccttttaacaaaattgaaagtatttatgcaattgtgtagataacttcaatgtaacaatgccaccatgtaaataacgcttggagaccaaaaaacctatatatccgttcaccttgaccgtttattaattcctcgagaccctattgctgattcactggcacctacactagtcctctaacaaggcctaagtttgacaaaaaaaaaaaagctatagtattacttaatagtattttgataaattaagacaaatgtcctgagggggaaaaaaagggaaacaattgtaactagaaatatagaaaaatatatataaatagttagggtttcttgaggactttgccggcgataagagcagcttccatgacaatggagatgacatcaatcacttcatcagcgtcgcatttgttacctttgaacgtcggttgcttcttctggctgaaattgttcatgcagttaatgaacttctgactacactcttggcttagataatcatctacgcataaaaacaaaaattaatcaaaattgtaacacttttatatgaaatataaggtaaaagtgggactagatatagagtgtatgtgaataattactattcttggattggacacaagcatcatgtttcatgcaacaagaatcaagaccatcacaaggtctctcaccaggacatccactgtaaagtagtccacagtacttcccatacctcagaaatggaggcactgtccaattttacacgttcttttggtcatgtttatacaaaaattttcagacatatgtgaatttattaccaagcttagagttagagattgttcacctgaacaaaactctgattcacatttccggctacattctttagtctaccaagacaattcaaaaccaagtgacctatcagtataaaccggatctaaaccaaaaaagatatatcaatgatcatgaccggttaagagttgactaaccaaggaaatggagggatgtatgagctgaacaccgacgttaagtgccgagacagagacagagaagaataaaaggaaagagaaaagtatgatcggagccgccatagttgaactggaaagctcggaaagtgagaagaatatatttgttggttttggtgaaaatgaagtgagttagaagaaggtagaagacgaatagtctgtgactctgtctctttgtcttcttatgtctcgtgactcatttgtttcgtatggctaataatgtgattttccatatttcccacatacataaatatcttgaagacttgaactatcaaacaatatataacattttttttttcttcacataattaaactaattatatcttgaactacaatgcaatacagctcatgatcaattattttctttattttttcaacaatcaacattactataatagtcttttttgataataacacaataaagttttatcagacaaaattgcttaaccgggttaattggtaggtaaagggcaatcatgaagtggacagtagtatctaattaggaaacctcgtttgattaaatcagatcacggtgtatatttctttttgatttttcgttaatgaattcttactttaggaagaaatttctctatacttcattctatttatttatttggaatatttagagttttttaatatatctccttgagtgttttgtttacctaaaactattgtataacatcttatatagtcatataaatgaaagttggccgactctctacatatgaataaaacatcatgacactagtgagtgctacaatgtcattctcaattaatatcaattttttttgaacaacttattaatatcattaaaaaacaacagaacttagtgttcaaaaattaaaattttcacattgcattgaatcatccatttattccactcttaactaaatatcttcatttaaaagaaaaaaaatataaaaacttatgtttatgtatcaaacactattttcattttacttttcttattttgctatttttttagtagtcattatttgataacaactagaaatttttgtgtattgcaacttagttgtttgctacttcatctttcttagtttagtaattgtaacttagtcttttcttattattacatttttttgtctacacgatatggtctttttgtgctttatgataaagtgataacattaataatgacatgcatatttttgtaagtaatggtcttttgagacgttagatataccaaaaaattcaatatacgacattctctccaatatggctatatacaaatgcaaagagagaaacctaaaagtgttgacctaaaagactgtttaatttttgcatcgatttttctctttcatctgaaaacttttaaagcaaatgagtagttagttatacatttgttatttaaattatgtcaatccaattcttagccatgagcttatcatgatttgattggaatactagattaggagaaaatacatggaacaataaattgtttgcttaaaatcaagttaggcaactttcaaatcaaatctatatatacatttttgcaacacttttatgaaataaatcttcaagttggaacttatttacaaagaatatcattggtattaattattagtaattaattaataattctaattactagcatttctgtacaaatcggacttgattcgcaactcactatagctccccgatcactctcgtcactcgtttgattacaagaaagaaataagacagacgattttatgagttcagactccaaatcggaaccttacgtctcgccggaggctttctccggaatccactaagccacaaagattgttactcggttacaagaatctatctcttctctctctctctactttctgttacaaaacgaatcaatcacagaagaaaacagagctcgggttataaagctgattctcaactttattcgtactcacgtgtgggtcccatgtgctaaatttgactaacccaaaaccgaataccctctttcttgtttcgagtctttcctatacttaggatattaatagcattggggtcacttattcacaattctccaccttgaccctaatgacgtgacttagttcttgactccacctccgaacctgattcaacttaaccaacttttaaactttgagtacactcactcaactacttatctcctgagtaaacccactcagcttcatgtcttgggacttaacccctcttcttagttctcagtaactctgagcaactctagagcttcctgaagcttgcccaccggtacgaccttcgtgaagatatcagcaggattggtttctatagcaatcttcttcattcttactaagccattgtagatcagctctctaatgaagtgatacttgatctctatatgcttcgtccattcatgatggactatatttttagctaatgcaatggcactctgcgagtcactgtaaatatccactgcttcttgctcaaaaccaagctcattcatgagccctaacaaccaaactgcttccttagacgcatctgttaatgccatacactcagcttctgttgatgacaatgctaccactttctatagactagacctccaactaacaacattacccacctacagtgaataccactcctgaagttgacctcctcccatcttgatctgcaccatgatctaaaacacagtaaccttaaaattatgaaatcccctttgttactgtatcataactttcgcttgagtgaaccctgaatatatctgagaacccacttgactccctgccaatgctctttaagtggtttactcataaacctgcaaactagaccaatagagtgtgctaagtctggtcttgtacctatcatggcatacatgagacttcccactacgctttgatatggaacagctctcattgattcatactgactcttagcttcctcatctgtagcagacctcaacttgaaatgtattcccactggcattaaaacaagcttagactgatccatgttaaacgttcccaatagttttgaaagataaccctcccgagagatagaaagggtacatttaagtctgtttctgtctatttccatacccaagatcttctttgcttcacctaagtccttcatttcaaactcagatcccaacagtgctttgagttcacttacatgcttcatattcttggaggcaataagaatgtcatctacgtatagcaacatgaacacataatcaccgtctgcatatttcttaaagtacacacaactgtcgtatgagctcctctcatagttatgagcctccatgaaatcattgaacctggtgttccattgtctgggtgattatttcaagctatacagagatctttgtaacagacacactttatctagattcttctcatcaatgagccttctagctgctccatgaatattgtttcatccaaaaatccatggagaaacgccgttttgacatccatttgctaaagctccatgtcaaaatgagttaccatactcagtaaaaatctgatggagacatgtttcactatagaggaaaagatctcttgatagtctattccctttctgtgaataccctttagctacaagtctggccttgaacctgggaccctcaactcctgctattccagccttcctcttgaacacccacttacaaccaataggtttctgttgtttgttcctttccaccaatatccaggttttattcttcatgagagattccatctcctcatctgacgctttgatccatttatcttgatcagcatcttctaaagcttcctgaaaacttccttgttctgactttcctccatcttcaatgactaaataagcatacccagcaacttcttctagctcaatctcatctgttgttgtctcgttagtattctgttcaggtgtggtttctccaccttgaacaatagctccactctacaatgagtccttcttcgctctatctgttcctgcattttaacaagcacactcatcagtagataaatcaaacgggttagaggacatacctgatttctcttgagctataacatctttgtacatcactttctccttgaagaccacatttctgctaatcatgcatctctgatcttctagtaaccatactctaaaacctttcacgccttcgggataaccagtgaagatgcctcttttttccctaggattcagtttcccttcatctgagtgaataaacactagacatccaaatcttctgagtcctaacatgtctggaatagctgaagtccatctctcttttgggatctggaaatcaatcgttgatgatgttgttctattaattaggtacaaagacgttgaagctgcttcagcccagaacttctaaccaagaccactctcactcagcatgcttctcacattcttcattatagtcctcttaagtctttcagcaactccgttttgttgcaatgtataggtgcatgtcctgtgtctcaccattccttcttgtttgcagaagtcattgaacttgtgattgcagaattctagaccattatcagtacgcaaccttttcacctttctctcactctgaacctcaaccatcttctttcacagtacaaacgcatcaaacgcttcatctttggttctgaggaaatatatacaaaccttcctagaccagtcatcagtcaacgtgagaaaatactgacattttatcgaggctaaaaggcacattgggtgatccccacaaatctgagtgcacagaatctagcttctccttagtaatatgttgaacttgcccaaagctcactttatgtgttatacaaaaacacaatcttcacataacttaagacttgagaccttatccttgccaaaacatcctttcttggccagctcatctattcctttctatcctacatgaccgagcctgctatgtcatacctgcattagatccatatccgaatctcctgactcagccaccatagcttccgacttcttagcttctccttgcaggatgtataaagaagctctttgtgaccctttcatgaacactgtatttccctgcattacctccaatacaccatcatttccctcaaacacacatccttttgcttctagagtacccatcagaataagatgccgagacattccaggcatgtatcttacatcatgtaacacaaatgtagtcccatctatgttggcaaatctcactttactgataccttttacctctgaaaatgagttatttgccattctaactttcccggaagtcaactcctcaatctcaatgaatatatctcttcttggtgtcatatgaaatgaacaaccagtatccataatccattcattctggtcaagtcgatcctcactcagatttacctcagaagctactaaaccaacctagtcttgagcatcatcctttgccagcctagacgcacctgcttcttgtgtgttcccacttgacttgttcttctctagccacttatagcattgccttttgaaatgatcctctttgccatatatccaacatatcttcttgccgtcttgagatcttgatcttgaattgttattctgatttcctttaacatgaagaccttgtgttgcagaccttgagcttgagtctgcctggaactctaattttttttacttagatgcgcttatcacctcttcaagttttaagccttctcttccatatttcaaggtctcctttaacatttcatacttgactgggagagaactcagaatcaagatcgcttgtacttcatcaggaacttggatttgcaagttacttagatctgagatcatctttaagaactcatcaatgttctcatcaagtgacttcgattcttgcatcctatagttgtataccttgagttgcaaatacacatgatttggtaaagtctttaccagatataatctttccagcaacatccacgctttggctgcagtcttgcactgatcgatcttcctcaataccttatcaccgacattaagaaagataatgttcatagctttctcacatcgttcaatcttctcagtttcttcttcgatccgcttcttcttcttcgtcggatctgcttcatcttcttctgacagtggtgggaacgaagcttgttccaccagagtatccttcaagcctaggattcgaagattagagaacatgcgtgtcttccagagagagaagtcaccagttccatcgaacaccgatatcttgatcttcgagttcgtcatccttgtaacaacgttcagtcaacacgagaacctggagctcttataccaatttgtacgaatcggatttgattcgcaactcactttagctcaccgatcactctcgtcattcgtttgattacaagaaagaaaagaagacagacaattttacgagttcaggctccaaatcgtaacgctacgtctcgccggaggcattctccggaatccactaagccacaaagattgttactcggttacaataatctctctcttctctctctctctctctactttctatcacaatagaatcaatcccagaagaaaacagagctcgggttataaagctgagaatcagttttattcgtactcacgtgtgggtctcacgtgctaagctttgactaacccaaaaccgaagaccctctttcttctttatagactttcctatacttaggatattaatagcataggggtcacttactcacaatttgcttatctaatatatctctatcaattctaattacttacacacacaaaaaaaatcaattctaattacttaaaaaagaagaaattttaggacattattaatattacactttattaaaagataaatattgtaattacttaaagtttattaaacgtttaaaatatttaacataaaaacgtttagaatatttataatatatgaaatctgtaaaaatgaaataaccatttgaaataaaactttaaaattggtttgaattatataagataaaagtattattagaacaaaaataatatttaattttactgaacgaacttagatggtaggacgggtttagaatattataatatatgaactctataacaattcaataaccatttgaaagaaagcttttaaattgaattgaattatatatcttttaaattaaaatattattaaaataaaaataacaaaataatgttaatttcattcatcggggttagatggtaggacgatttttggtcaatagtaatacgagatggtataccatgaatgaaatcaattagatatatttaattttattgaacgggattcaatagtaggacggatttgggtcgatagtaatacgagacagtattcgatgggtgaaatcctagatataataatcaaaatacaattatattatcttaaacactaaacaaaacaaacaatattatcaaaacaaataaaatataaatttaattattcagttataatctagattttaacttaatgaacaatatgctaattgtttttaaatttttaaacaataaaaatcaaacatagtaattgtacactaaataatatatagatataagggttatatatttagaaaatacaaaacattaaatcatatatatttgtaatctactaaacaaattaaatttttaatgttttgaaaaaatagcctggcggtgtaccgcgagttaaaatctagttgtaataaaattacataccattgtatcatatattgttgatgtaagtaatccatgatagttaaaaaagattagaattttgggtatatagataagaaaatttatacatgaaaaaatataattgatatttgaatcaaaagtgaatctaactatacaaaaataattacataaaataaatataactttattaactacataataatatacacaaaaataacataaattagcaataaaaatagttaaacataattagttttaaaaaattatcaaaacatcatcactttaccatttgtcatgtgtctattaaataattgtgtgattttgaaaattgccctatttttgagtttttgtttgaaaactacactctaccctatttttaattaaaaatataattttaaattaaaaatataattttaaatatattaaatgacaattctgtccagattgtttttaaacaaatatttttaaaacaattaaattaaatacgaatttttgaaaaaaatataaaaacttaaattaaaatcttaattattattttaactattttaagatgaagacagtttatatattttaaatattaaaatctaacaagatattatcaaaaaaatatttgaaagtttatcgcttcatatttctcacatcatataaagaaatcaatccaactccaaacaaataattctttaacgctacattttttttaatctaaaattcttttactctacattattactcaagttttgaactaatttagctttgtttgtaaatatttgtgatttcaattataagaagatgataatgaaattctgcatggtgtaatttatacatatatatacactaacttttctcttttaaagaatattctttttttttctttgtcttgtaacaatatttttcttacaaaatatatatattcaagataaaattatatgtaaaattgttagttagttacatcaaatatttttaaattaaattatatttttttggtgtcgagaaaagataaaataacaatctgatttttgtttttaatataaatgttttaaaattattagtaaatttaagtaaggatatatttataattctctatttcttttatatttttaaaaatatattttaaaagaaaaaaaatgggtagcttatttttcaaacaaaaacttcgaaaagagacatttttccaaattttctctaaataattaatgtaagctcctcaacttctaacttataggttaatgatacatttaatatttaattttacatatttaattgtactattattaaatttattttagtattacatgatttttcaataaaaccaaactcaaagtattagtctataatagtcgtggatttataaattatttgagtaggttattctcataaattgatatttatataatcaatcatcgagggtgaagaatacgtaaggagatccatcatcatattcttaggtttctagaatccaacacttccctctcttaaattggtttaagacgaacgttgtttatgaattatttgtatgatgcacttttgagaatgttattagaaaaaatatttaaatactaaaagtaattgcttattacatgagtaaatgattagataaataaaattatatttaaattaaacaatacaaaaaatccgaaaaaactgcggcgtgacgcgggtgatcacctaatattcataattttcgtctgatatttgtaaaaatacttgatcatcttattccattattgagtctctaatgtaaatgattgaagatgcctatgagaaaacttattccacatttttctaagtttctaaagcaacatatatactattttttgtttaattatcatgaaatacttcagaaatgtctttagatcaaactgatttacaaagaaaatgggaccacactgtcttcgaagcccatatccttcactttactctcacgccactcttcctcgcacatgtataaataccaaactgaaaattacccatattgactcaaaactaggcaataataactaaaatgactctcattagtgatggataactagactaacacaaattttatgaaaaaagaccaattgaccttaatcaacatttctattcacacaaaaaaaatatttcatttccgaaaattaaaaaaagaaacaaaacaattaagaaacaaaacaattaaaagcaaacataaactcgatttaggtcatcttattttctccaaatcagactttcctctcatgaggccacttttttttcacaaaaactaaggagaccacgtttttttttataaaaaccctagatgttaacatttaatgttttagtggtaaatatggtaactgctctaataagtctgttattgcaaagaaaaaaaactgtcaccacagtaaatattattatagcaaacaattatgcaaagaaaaccataattgatttttgaaattatagaattttttataaatttgggttgactatgtttatttatggtatatcttttttttttgtcaaccacacattaattaaaaaataataactccatgattggttgcccaattaggaggaatagtgtctacaaaagtaattttagaaaataaaaattctagaagagagggctaagtaatcccctcttacatgtaagataagggaaagcgagaaaaaggggaaagagacgcgtagcactccaagatcgtctagaatattggaaaaagcgggtcattctttcggtgactgtactatgtatatttatggtatagtttttcggtgtagagtttagtgtttaggatttagaaattagtttttaatattaaaatttagttatagatttgtggtatttttgaaaaataaaattaattatagtatttccttggaaaaaatttcattttagtggtatataaaagaatttctaaaagcagttgacaaaaaaaaatcaaatctgtcataatatgagtttccaaataaaaaaaactgttacaatagttagtattattctattaaaaaaatcatgaaaaaagaaaactaaaaatcggtcggatttcaaattacaaatctttcgtaacataaaatatctttaaggtcattccagcaatttattttcttatttattaaacctgccatcaaacgacaaatttatggtaatataaatttatctgtcacaacataaaacaactctgtcataacataaaaatattatattttagaaaacaaatctgccatcaaacgacagatattgtgtaaaattacaaaaatatgttataacataaaacaagtgtgtcataacattaaaaaaaacggttatcgttagaagtctttctagtaattagttatttgacaacaaatctgttacaatgtgactgatttttttaacaaaattataaatctgccatcatttaccgtaaaaaaatgtctacacaaaaataagtctgtcaaaatatatgaaagtctgtagttgaataaactaaaaatctgtcaatcaaattaaatatgctataatttataaatctgttatcgctattttctaagaaatttgtcaaccataaaagtctggcacaaaaaatatgttgtagttaaaaaagtctgcggaataagaataaatcttccataactaaacgatagacttttgtaaaattgctggcattttttttaaagggtaattttgtatttattttatttttaacacatgaaaaaaagtattttagacaagaaaataaccaatttaaccccaatattttataagacattgtagtaattaatctcgttattttgggttaatttagtttttttcccaataccaaacaacatttgcctcttttttacttttaactagttgagacacactaaacccatctcctattatcttaaacatgcccatcaaaccggttttaaccaccctaatagctcttttatccatcattcttgctctctacacgatccaattgccatcctttagatctctctcttctatagctacaactatcataaacaattcccaactcggagcattaggaaaatatttaacattctttggacacaaacaccatcaccatgaaccaataaaatcttgtgagaaatggacgtcaaggcttacacaccaatacaagacttctcttgtgttgaccgtgatttgcatggttgtggtaacttcagcaatgttcaaagcgccattgatgctgtccttgatcaaagctcttccaagactatctttaactccaagctcttgttcttttcccctatctccagtgctcaatgatattcttttatagtgtaatatgatatatatatttactaagatttgagttcaatgtaagcaagcagggaaaatgttacggttaatgaaaacaagacaaaccttattattcaaggaagaggatatcaaaatacatccatcgaatggaacgacacagcgaaatccaccggaaacactgctgaagatagcttctccttcgtagtgtttgcagctaacttcacagcttacaacatcagtttcaaggtaaggatatcgatgtcacaacaattaaacctaatttagctaacgcatataatgatatcagttctcatgtgtgtatatgttttgaatggaggaagaataatggaccaaaccagatcctggtgaagctgatgcacaagcagtagctctaaggattgaaggagaccaagctgccttttacggttgttgattctacggggctaatgacacgctactagatgataaaggaagacatttcttcaaagattgattcattcaagggtccatagattttatatttggcaatggaagatcacactaccaagttaaaaataaaacacatgcatgaccttttcaaaatatgagcttaatactctaaaatcgcaaacaggattgtactattaattcaatagcaaaggggaatacatctagagttactggatctatcacagctcaaggaagacaatcagaagatgaacaatcattattctcttttgtgaattgtaagatcgatggaagtggggaaatattgcttggaagagcttggggagctgatagtaggattttactcaattaatccctaaaacactatcttgtcgttgtagtattttaggatgtcaatccaattcggtgtgatgcaaacagatgagatatgatcagaaagctctaagtcaagccaagcagaaagttggttggttctaaagtcctagtatgcaatagcagaaatgaaatgaaactaaaagcagaaatggcaatagcaggcaagtgaatgacaaagcagaaatgataacaggcaatcaaatggataaacgattcctaaggatggggtaatcgattagtgtggtctccttaatctattcaggcgtttgacaaaacttcacagaagctatccctagacaacaagttcaacaacagattaattcactcccgtgatagaaatcctcaagcaaagctagacactgacctaaatccctttagcaatctctaactaagcagacactatcgaatcaacatgttaaagtcaataccctctctacagtcaatcccttggggtagagtcagatatctctggaattaataggatctaacgcccattaaacgccttctgagcgctggacgtctggactcatactccacattagccagtgaaacaagcaataagcgcaactaatccagaagggattctagtattctaaactcaaccacctaaaatgaccaagtaaaccacaactattctatcccatcctcagaaatacagttcactactcagacataatcaaagacaatagcaaagcaacaattgaaaacatgctaacagaaatgacgaaagacttaaacgaaaactgaatatcaaatacttgaaagcgaaactacaaagtcgcaggagaaacactgcggctatcaaagttgagaaaaaggtaaaagcgagataataacggataatagcggatgctagcggatgccctagggaaaaccctaagaggcagtttatataagcgagaaatgaaactaataaggaaactaaatatatagcgaatcttcacgtcatgatcctgcgaccgaatatgtcattggcatctgacgggcagaaatgagcttcctagtgatcgagtatgtcattgatcaaactaggcttcaggggatccgtcttgcgatcgagtgagatgcagtgaagtcgagattgaatggtccagcgaccctgtgatcgagtgcgatcgagtggatgtcatgaggtggtgatcgagtggtttctttggcttctcttctcttctttgttctcagcttgtcttgttgagtgcaaaatgagcagataggcttcttggtgatcgagtggtgatcgagtggttctgatggggtgattcctccggcttcgcgtttgagtgaaactgagctgcttgcttctccggggttgcgatagagtgatttgccctggcagggctccgaggctgtgatagagtacttttgctgaaggcgtcattgggcattctgacttcatgttctgtttttcctctgtttgaactccaaaagcatccaaagtacctgaaaacaaccaaatatgccatgcacatgcaatcctaatgcaaaatcgtcctaagtatgtaaaacacactaaaacgactcctaatgagatgaaatgtggatgaatcaatgacaaagtggtgaagaatgaatgcctaaatcatgcaaattatagacatatcatgagcctatgctacggttgtgttctcaaatactcacatgtctggaatcattactccagaaggatggaataactggggagactcgaccatagaaaagtaagcgactacatacacatcttagaatacacataaaagaccttatttatgtcttgtatgggttttatattttaggacgatgacttttggagagcataaatgttatggacgggaacagattacaaagagagggttttgtttgggaaacaactcacagattcagaagtatcttctttcgtagatgtatcttttatacatggtgatgaatggctccgtcacactaacatagtctctgagcatacatctaaagacattggagatgatcttataggattttactaacatatataaggatatacatgaataaaaaacatttaaatgtagatacatacagattttaagtatatgtagtcacactgagatctgttttgcgatgaagataatactcttgtactgtatatcgtaatctgagattttggtatgtttaattagctttatcattctgtcaaaatatttccaacaaatctaacaaacgaaacgcatgtgtctaattagctcacatttcttaataaagtttctaaggtatttgtgatttcaagaagagcacaaaatcaagatttcaaacaaatgctacttaatttttcatcaaatgaaaagaaaattatagtcaaagtgattacaatacatataagagtaatttcacccacctacgtaaacaagtctaaacccctaatagtaaaagaaccacaaaagaacagcctcaacatggtaatatatatgaccaatgtcaaatttgaaatagaaagaattaattaaatattttcgactctaaacttaaaaccaaatattccaagagacatgcataccttcaaggcttcaaccaaaagtttttattttttctttattgaaagactaaattaaaaacgagatcatgacattggtgctccttctcgtagatgcattctttcgtaaggaagccaacaaagccaatccaaggagcttcgacacaacacaaatcctccaatgaatatggctttccaacaaatcgtgtaaaacatctttttattccctttggatgttcatcatctttacctgcaaatgtcacacaccaccgttgcctcttccgcgaagctccatttctgataacaaccatcgcagactccgaccgcatcctccgacgatttgaggtaatatccgacgcagttaacttctctaagttattcctgaaggcaaaagcaatgctttaggttttcattgataatactctcttaactttacaaaagatgatggggttttgtttatatacaacaagagagacatagctaaaaccctagagagaaacgacaggtgtcacacatcaagctggactctctgaatcaagggtcaggaacctgttctcaagcttgatgttgaaagccttttccgtactgagattaggtgaacttgtcttgaggttgccagctctgttcttgtcgttacttggagaagatgaccgttgcttccaagtttgtgttgtgggcttcttgggcctgcattgggctttcatttgtttctttgctgagttcagagaaactgcagagttttgaggcttcattacttgaattgtgttgataattcccaaagtcttgtttcatgattcatcttctttactgtaaagaaatgaaaaatgttcctttctgatattatatattcacaaaattctgacatttttgactcttttcatttcgtagatttaatttcgattctcctccaaagatccatctcatattctctgatgttccggttactccgggtaaactcatgaaccttgcatcatcttctttgtctctgagtataaatattaatttttctgtgctgtcttgttatgcattttcatgccacgtcaaaatactgtcaccatttggatatagcactcgaaagttggtactttttgttgctttatcaatcattgcatgaaacgctggattagctgtatggtagactgcagacaagttgtcacaaaacaattcaggagtatctgggagaggaatgccaagctcacggagaagagtgctcagccagaggatctcagaggcagcatcagataaggtgcggtattcagcttctgtggagcttcgggagacagttggatgtttctttgacgaccatgacaccaggttcgtggccataaaggtgcagaggccaccaacagagcgtcttgtgagcttacagttgccccagtcactgtcactgtaagcttgcaaaagagtaggagaattttgattgtaagagattcccatagtgatggtaccttttatgtaccttagaatccgcttcagaagatgaaagtctgacattgttggctggtgcatcttttggcacacgaagtttacagcaaaatgtatgtcagggcgagtcaaggtgagatattggagctttccagcaatactcctgaaataagttggatcagtgaaaggttcttcttggtgtggaactctgtcaagctgaacgggtagaggagttggcagaggagtgcagttctccattgcagaagccaccaagagatcttcagcatacttctgctgagacataaacaggccgtgttgatttcgctgaacctgaattcccaggaagtagtggagttgtcccatatcagtcattctgaattctttgttgagagctgctagaagactggataatgtctgtgaactatttcctgtaatcaccatgtcatcaacataaagaagaagcagaatgaggttattattatgagcatagatgaatagtgaagggtcagatttactgcagaaaaatccaaactccaagagaaaggtgctgaacttgtcaaaccaagctcttggggactgttttaaaccatagatagatttgtgaagcaagcaaacatgagttggtttactcttatcaacaaaaccagcaggctgagtcatgtaaacagtctcatttagatcgccatgtaagaaggcgtttttaacatccatttgcttcaactcccagttcaaagcagtagccaaatggagaaccaattggactgtaggtgttcttactacaggactgtaggtctcaagatagccaatcccttcttcttgaagaaaacattttgcaactatccgagccttgagcttatttaaggttccatcagcgtggagtttagtccggaagacccatttgcttccaagaacatgcatgttaggtgtgtatggcaccagggaccatgtattagtttcagaacagttgcccatttcttctgtcatggcgcctgtccaacccggatgctttaaagccgcagttactgtctttggctcaggataagtaaccttgtgagacagaaaaacataacgaggatttggttttgtgattcccaccttagctcttgtgatcattgggtgagtgttagtaggaggtggagcttgttgagtaggaactggagctgccatgagatcttctacagtgtcatccaccaaaagctgggatgagtgagagctgtcgccaatagaagcagaatcgaagtttatcgtacgctcagaactctcattcaccacagcaggtggatgagttgaattgattgttgttgttgaaggttgagacacaagtgcagcagcagaattctgagacaactgagggcttctccgtggtaaaggaggaaaatcagcagcagtaaaaagaggaggcgtgggtagtgttgcctttctctgtggtggttgtgctggagacacttttggtggtgcctgagacacggaggattcaaaccccttgaaccatgctgcaagtaatggagttgtaggctgcgaatgaaggtgtttatagtgatgagagaaaggataagctgtttcatcaaaaatcacatgcctgcttatataaacccgtcctgtaggtggatataaacacctataccccttgtatttgtcattgtaccccaggaaaacgcacttaagagagcgagggtcaaatttgttcatagcatagtcacgcatagttggaaaacaagcacaaccgaaagatctgagagctgtatagtccggagtcgtctgatgcagcttttcataaggtgaaatagcatcctcaacagcagatgtagggagaagattaatcagaaagttggcagtgaagaaggcttcaacccaaaacttaagagggactttactctgaaacagcatagataagcctaattccaccaaatgcctgtgcttcctttctgctagtccattttgttgaggagtgtgaggatatgagatgtgttgttgtatcccatgattctgaagatgttgcagaaacttatgattgacaaactctccaccaccatcacattgaaacacactaatcttatgattaagttggttttcaactagcttgtgaaatgcaacaaagatattgtagaaatctgacttgagcttcaaaggataaatccaactgaatcgagaataatgatcaataaagactgcataatatctaaagccttgtacagaagtaattggagagggtccccacaagtcacagtgaaccctctcaagaggtctatttgaagtaaatgaagaagaaacaaatggcagcctagtgctcttcccaagctgacatgcttcacagagtgacttagaagtcttattgatagagatagagttggtcttgaccagttgctgcaggacttgaggatgaggatgtccaaggcgtctgtgccacacttcatcacttgcggactgctgacgagtggagaagaaagccttgaactgagagtcatccttcagacaatataaaccatcacaagtgcttcccattatgagaagcttcttggttgccttatcattgatacgcacaccatcagagtcaaactcaacagtacatggataatcttgagtaagcttagacacagacaagagagatttcgttatgcttgggcaaacaagaacatcagtgagagggacattacctgatgaggaagccaagtttgttgagccagtgtgtgtaatgggcagaaaattaccatcagcaaccatgacagcatcagatccatggtatggttgagattgttgcagggatcgaggactgtttgtgacatgagcagttgcagcagaatctggaagccattcattgccatgttgatctgtaatatcagtgatgcgcattgcagctaaggcacgaggaagctcttcgtattggtagctgttgttgaagcgatgccaacacttaagagctggatgacccattttcccgcaaatctgacagacaaccgaagtaccaccagactgagaacctgaagaactgtttgttgaagatatctgctgatggaaaccacgaccacgagtactaaatgagtttctgcctctgttagatttccctttgccacgattgtaagcattgaagtaaccagaagcattagagtcatctgaagtggtgatgttgaaggcgacatgaggtgaaactgctgtctcttcaagataaccctgaagtcgatcgtcatagcctgtaagcttaggaataacatcctctagactaggaccaggcagagcatccatggagttttcaatagtggttttgataggctcatactctcgccctaacccattcaaagcagcaaaaatcttcatcttttctgttacaggacttcctacagaggctagttggtcacaaatagtcttaaggtccttaagatattcatccatagatttatcacgtttgctaacattttggaggcgtctttgcagctcaaataacctagaggaggaaaccctattaaagtggtttgctacagagatccatacctcatgagaagtgttgcagttgaccacaacactgagaatatcttctaagaaagaaccaaggagccaggatttgacaactcgatctgtcttgaaccaggtgtagtactcaggattgggtgaagccgatgttgacccatcaatgtctgaaacaacgctggtttggcttggtgcaggaatcgagcctgtgacaaaacccagaagcccttgaccatcaagaaaagattcgaactgagatttccagagaatatagttcttggcagtaagagtgacggtgacacaatttgaaatattgagagaaggaacagagtagagttccatggatctatgttccatgagctctgataccatgaaggcaaaagcaatgctttaggttttcattgataatactctcttaactttacaaaagatgatggggttttgtttatatacaacaagagagacatagctaaaaccctagagagaaacgacaggtgtcacacatcaagctggactctctgaatcaagggtcaggaacctgttctcaagcttgatgttgaaagccttttccgtactgagattaggtgaacttgtcttgaggttgccagctctgttcttgtcgttacttggagaagatgaccgttgcttccaagtttgtgttgtgggcttcttgggcctgcattgggctttcatttgtttctttgctgagttcagagaaactgcagagttttgaggcttcattacttgaattgtgttgataattcccaaagtcttgtttcatgattcatcttctttactgtaaagaaatgaaaaatgttcctttctgatattatatattcacaaaattctgacatttttgactcttttcatttcgtagatttaatttcgattctcctccaaagatccatctcatattctctgatgttccggttactccgggtaaactcatgaaccttgcatcatcttctttgtctctgagtataaatattaatttttctgtgctgtcttgttatgcattttcatgccacgtcaaaatactgtcaccatttggatatagcactcgaaagttggtactttttgttgctttatcaatcattgcatgagaaacttcaattataagtttgggtggaagaacttgaagatggcttgatccggcagggtcttcttggcattttggttcattggctcggtagtttttgatattttctcgcccaaacgtctttagataaatgttacttgctggatcaatttgagttgggctaaatcttccagttttgttcgatatgatcggtttagaactctaggaataggaacacgaagagaaacatcttctcttctgttttctttgcccatgacatcatcgtttacaacgtacatgttgataatgtgatgatagtttaacaacgggaagaagttatatttactctcatattttgttcaatatacataggacatatatatatacacaaggtggacataatcctaattaattacaagagaatattttagtagtaatgataggagaaatcatagggattggtaattgatttgaatatgctctttccttctatacatgtttcatcatcaatatacacgaagccctcggcaacaaatcatctcataagaaagcgaaactgagaatcaataagaaaacagaacatgaagcaaaacagagaagcaaacaaaaccgaatcgagagttgagacacatatggggcaaaccgagtaccccaaaagcaagaaacaaacagccattttacacatgttttcattagtgtaataatttaacataaattagaagtatctaatctctaaccccacacctcacagacacaatgtcgccgttgagacaagagagaacagcacgaccaagtgtgaagtatgaacaatgtattaattcctcactttataacgacgccgtttaagactttttcaagacaccatgccatactaagcattagagttaataatataagaaaaaaatacacgagggtaagggtaattaatccattttaagctgtctaaaattttctaaatgtttataaaataaaataaaaaacaatatggaatttgttttgggaaaattgaaccaattttattaaagaaattgcacattaattttttctaagacccttttgtatttttcttggtttctaaatggtggtgtttttgtatatgcacactccacttgaaattattcagttattgaacagtttctaacttaaaatttgaattagttttctttattttaagaaatatacgtcatacaatgatcaatacactaagaaataagtccataccaaaaaaaaataagttataagaaatatactattgatgtatatatataatttgtttattgatcctatagggtggttgaattgatggagatttatgaggtagacaggcaagagatgatgagattgattcatgaataacaatatgcgcatgagggaagaagaatatatattaaacaagatattagataatattgggagttcaagattagaactctctatgatgaaagcacaataagatcaatagtcaaagagattacatcaggtattagtggctccattaccgctcaggacagggactcacttgatgagaagtctggattttctttcttaaattgtaagattgatgtaactgggaaggtgtggcttgagagaccctaaagagcctaagcaactgtggttttctctcaaacttacatgtctcaagtcatctctaccgatggatggaatgactggggaatctgacctaagacaagtaagtgtagtaactttcattgcaagtcatatactacataatctaaattatgctgaaatgggttttgttttcattaagactaatgatgtataacgtgtaatactacgatgtccttaacgtctagatttttgagctaaaaagatcaaatgaacttggtataaggtctttgtcaaagaaataatagtttgtaatgtattgatcatagcataaccaagtttagaatgagagagtaagagtagctatactagagcctttgcctttttcttcacaacattaaaacttgaagaaatcttaacttattgactaagtagtgaggaaagagtagttatcactaatgcctaattgggcagattgtaagtagctctattaacttctctccttcttgtccctttaagatgaaaactcccttaatcaagcaagtacaagcaatttttaagcaaatgttaagcattttttgagcaaatgttaagcattttttgagcaaatgttaagcatttttctgcttttttaatataagttatgaacatttacaccatgtggagtggcatagtcgtgttctaccatagactgattcaagtgacataattagatttttttttacttttgtatagtttggtaataatgtaggtttttaaataagattttttcaaacaaagtttattgaaaaacaaatacttaaaaacacaatgtgtgcttttatttaaatattttattagaatataacaaaaataaaaacttaagatgagtgttaaaagcatcttgatcattgtacaagataccaactctcataataaatacatgtaaaagtcatcaattgaacgaacggaattcattttcgtgaattgcaaaattaaaggaagcatggagatcttatgcaaatgttgtcttctccaagacatatatgtctagagttatatcttttgatgggtggaatgacatgggagatcacaagacacgaaggttagtcaacataaatcacaatgaacagattaataggagtgtgtattactgacttaattgagttgattttttaggactgtgtattacggagagcatcggtgctacgtatcattagcatcaattcttttcttctttttatcaaatatatatacaactatagttataattgataatgcaacataacttactaatataattaattcagaaatataagaataaacgtggctcataagaaatgaaagaaattgttgtttgaaataccaaaagcatttgtatgaaacaaaaatcttccgtactttttgggttgtaattaatatatcattaggatttctgcagttctagaaattcgcaatctacaaataattccaattgacgaccaacttttttttagtgtgtttttgaattcattctagtcatgagtaaactcatattaagaaaaaaagaatatatggtctatgattttattttactggaactcttttattttattttatttttaacaggtcagatttagatggaagagatctataatcctatattaaacataatactattaaaataacagagctattaaaactttaaatctcttctatttgtagaaaatcacaatcatgtttttagtctcgtctttatatttgtagaaaatcacaatcatgttttcacaagaaaaaaatcacaatcatgttcatgtggatgaaagatattgcttgtgtgctttgtatttctttcctttaaattaccatatctgacgtagtctattaaaaaatttaattcaccttaatttataaacatcataaaaatggtaatttcatttatcttatataatgatcttgcatgattcaagaaaattttcatttaggttcgcgagagaaaacgtattctagaaaagtggcaaactcggtgtccatatattgtggtggattatgttcatcgacgagctttggtgatggcttcacgacggatatcaagggaaagctttgcatcgacgccactgatctcctaggctttgtggaattcaccaatactctatgtagaacgcttttgtacctcctgtttaggggtgtcaaaatcggttaagattcatgggtcaactcaactcaacccatgaaccataatgagttaaattttttgattcaaatgagttgataaatcaaatgagttaaaggtcaattgatttgatgaataaaatatctacagagaataaacaaaaaatagttagttttgtagaaatgttttagatcaatatccccttattattaaaagggaagtacaaattgaaaaatggtttaatttgtgatcaatttcaattttaattttggattttgtatattattaatcaaagtcgtcaatggtaatttggtcatcacactatattttttaaacaaactatatttcaactttaaataatgatcctttaacacactatattcaatacttatcacctatttattatttttcaaagatttcaaaaaaactaaatataaaaaatcaatctaaaataaaccaaatatatagttattaatttaagacattttttattaaaaatattatgttggtaaacaatattaagagcttgcgaatcaattagtggagcggattagaatttacattaattcgtaattctgcatatgaaaaacatttatacttaaaaatcaatacggtaaaatcttacatattcaggatattatttaaactaacaaaatacggtaaaatcacacatattcaggatattatttaaactaacaatcttaattgtccattaagactttccaaatcaaaaagcaataataacgtaatgataataaaatctgatttaattaaaacattcatgaataacattcctaaactaatgtttactgcaaactgaattctagaagtttccatatcatataattcgaaacatttctcagcaagccaaagagtaaaatttgttttacaaacaaaatatttctttataaaatcactaaacgtcacttcatcttcactatataagagcatgtcattctacttaaacgaaatatcattatactaaccccgattcagtttcatttgtttaattcattttttaaataatgaaaatcatttataatttataaaactttagtttcagattgtttcttacatttgtttttaatatttatgcatgtagtgtgatgtgcgaagatgataatatagacgcacacatgatttcattgaggtatttgttcatatttttttctatcaagctttaattgaaatgttaatttttataactaatctttatattttgcttatagatcattctcataatacaaacatattaggagaaggatacttcatttccgagtacaacgcatgatgataatatgattctattctttgtaaaacaatttcaaatgatcacaaatctaatcagttctttgttgaaaacagtttacacattccatcattattttattggattgtacatagtctaacatttgattttttaatccatcaatttttcatgtgtttttttgagttttgttttgttgatatatatacttaaaatatatatgtcaacaaatttacatgacaattgttttttatattataagaaataataaatatggaaataaatcttcaaaaattattttacaaaattattaaaaatttggtcaatatctaataacatattgtaaaaaaaaaatttagatttatgaataatttcgtttttgggttttgctaaaatttaaggaatgatctgatggaagatttctgggtcattttttttataaaaaaatcgacctgcaaaagcgggttaaaattagtatttatttgatagagaatgagtaaaatggaattgtgaatgacctttgactcatctaaattaataattacaatactaaattggagcgtaatacgggttaaactaaattctataattctaatactattttgacaactctacaagtgtgagagaaaaatctgaaacactatatttaaaactattttgacatgctaatcacttatcaatgtcaatctctaaacaacctaaaattaactattttgtggtgaattgctacttgctagcgtaagtcttttagatatttgttttttatgagaaatgatttgctttgtaagtgtttttacttacggatttaacaaaattggaatatttcattatctatttctatccctcaaataaaaaaaaacacttcatgaaagtgattaatttattaaataaagtaattaaaataattttataaacaagaaaagatagaagaaaatgtttaaaacctataaaaattaatatacctcgagatgatcgcttgacgacaaaagagccaggaatgggatcaacggtgacccactcgtcacggtatagaatctgaaggccttcgacgtcgtcttgaaggagaagagtcaagaagccgtagtttgagggcgtcagctctggctccggacacggtggataacagttcaccaccactacttgacttcccttttccaactcctccgccgcctcatcaccgccatcaatttcaagactttcgaagatggctttgaccatcatttcgaacatctcttagcgtatgtagccgccgaactcctgttttcattttttattcgtataaaagtgagttgcgggaattttccaacctaaactattaacaagctcattgtaacaaccatctttttaatatttctgaaaaaacatcatttattttaggattcatccaagaaaatacgcctccaattgaaccagtcattaaaccgggtttaaccacaaaattgcatttactattccgcgattacgattacccacataagtaatcacgacccgtcttgagattacccacataagtaatcacgacctgtcttgaaacgacgtcgtttcacctttgttttatttccaaaaaaaaccaaaccgatgtcgtttggtcgggcatcattgttcgaccgattgaaaaattagggttcttgagagaaaaggggaaaaagggaattttgggatttctgttttttttttgaaattatgtcattctggtatgggtcttcgtcgagttatgaacatagggaagatttagtgtatcagagtgacccagatgatcctgattttgagggtccggagagtgggagtgaggtcgaaacggcggacggtggaagtaaaagtggcgatgagggagacggaacaccagcatttcgatgtgccagacttgaagcagacgagtagtagctcgtggtgctcatcgtttcttcaatttcagaagtgaatatgaaccctaaacctcaaatcgattttgattataaacacaaagaaaataacgtcatttttgggtaattttgggaataaaaccaatgaaggaaacgacatcgtatcgaaacgggtcgtgggtaattatgtgggtaatcgtaacgtgaaacagtaaacacaaatttattgtttaacatggtttagtgagaaatttgtttatttcagaaatattaaagttgatggttattttcttagaggaaaaaagtatgggagaaacgatgagtttgtaaatagtttaggttggaaaattcaggcaaccctatttatagattcaaaagctgccacttaaatatctatatttttaaataaatttagtaaccgccctcgccctagtcatctctaataaggaaaaatgggcaaagaaactcatctttgtcaaaagcattttaaaacgtgtaacatttatgtatatggttaaaactctaacatttttctcattttttttattaagaaaacataatctccttcaatttcttctccttaattcttccattaatattaattaagagtagtccattctatctcactttaaacaatgatattaatgttgttaaggaaaaaacaatattcatccttgaaatttgtcaatggaaatacatttaattttgtagaaactaatagtgtaaatgaaaaaactatctcttgagtcttcctcaatcattttgtctcttgaacgtagacaataggatctccaatgttgctaagtaaggtttccaccaagtggtgtaataagcaggttttttaggcctacttatttgctgaagggtgtgaggttcagtttaattcccctacaaacactaacatatcgatgcagctatacggggtatcaatccagtccactgttattgctaccaatcaagatgtgtacagaagcaactaagtcaaaccagattataatgatggtgagtttctagtaacaatcctaggtcaggaatcaaacacgaaaatgagaactttaagagccctactcgatcattgggtccagtagaaccaacaggcaacaaaattaagtaactaaaatgcaatcaacagaggatacaaataacaggtacataaaagtgcaatcaacaggggatacaaataaatctaatagaagttctaaggatggattcattgataagggcaactctcgggttcatcagatggctaacaggtaaaaggtagatacccttgacgatagattcaaaaactgggtcaatccactgtcgtgacaaagaccgccataacactaccacttcctaatctcaattgtcgttgatgaaacatagcagagcagggtttaagaaacaatctaccaaagccaataagcagacaagccaatgtcttggtcgagtctacaaatctctggaattcgtagatctgacatcaatttgaacgtcttttgtacgctggacgtctatgatcgaatctccacattagccagcgaaaaccgcataggggccaagagaatccagaagggttctaacctaatcttaaccacctaactaacctagagattaccctaatctaatccatcctcaagaacacaaacccagaaattactcaaatcatatcaaaatgtagatctaaacaagctaaacaactttaccaaaacaactaaatgcaaaaacaaaatagattaagagtaattaagttttgaagattcataaacagaaagaaaactaaaggataaaagctagatcctttggacaaatcccaaagtgatgtgtttatagtaaaatgttgaaaccatagattcactagaagacaagagacttgaggcggtttagaccgatacttgatcttggggatcgagtaaagaggatgctgcaaagtttgcgcctttgtgtctatgctccgagtgatcaattggtcgagtagatgcatcttcctctcctatccgtatgctccgatgtttggttgagtggggaatgaggaggatccgaagtcgctttgataaatcaacaagtcttgtagagtgggtcacccttggtcgagtagaggatcgagtaggaggggcgagtagatcaatctgctgcttccactgaggctgccttgatcgagtaagaggatcgagtgaactaaagcctcctctgtagctgcctagatcgagtaaagaggtcgagtataatccttttaagctccttctgcacctgaaaacacaccaaaacatgcaatgtgtatgcaagatgatcctaaatgcctaagtatgcaaaataagctaaaatggtgcaaaatgatatgatacaatgagcaaatgtaaagctaaatgatgataaacacacacctaaaatgagtaaaatacagtgttataaactcccccatacttatctctagcttgccctcaagcaaacaaaaaatcttaagttgaaggagaggtttaaaggtggggattcaaaaaccgaagcatacatatagaacgggtaagctcaatgtccaggtaggtaattctaggttgcaagatgatagacctttacttaaaaacgttagccatactcgtcacaatgcaacctaacaacctgccttaatatattcaagcattctcatcaaccaattcccttgaatattcattaagcacgaacagtggatcaagcaatgcaatggttatgaactcacttggtttcgggcttaggctaagagacaaaaatggtccctctattgatttggtcgagtaacaggggactctcagagaaaagattgagcttcagcagaatgctaaaggtaaaaaccaatggacacatacaagaacagactcccatctacccaatgatatagtatgatagctcagaagatgatcgcagtcccacaaatgtcctaactctaccctttttcttattctttctctcttttggttcaagttctaaagggttcttctttgaaacgattcaagagtctagcgggtttggttttatactttgaaaatcttaaggcttttcttctaattttagcacatagggcgatttatcctttttttgaatcacaatgcctaacttctttgaattccaaaccctttactagactaacacttttttgtatcccccttaagaactctaaacaatttttttttccttttctttttattttcattctctttctcattcccattcaatccattcacaatcccaatcccaaatacaagtctccacctagtcctagataacccaaaaagcgtgggctaggtctacatgaaagactgctcttgtcggctcatagctaacacgttataccaagctcaatcgaaaaagacctcacagtcagacacaaatgatctttggcataaaataaggctaggctaagggtatgggaaactgctctaaaaatgagagacatctacttggattaacagagggtggtgaagtgaataagataatccaagtatgtatatggtagccatgagttcacaaacaatgcatagacatgataattacaaattcagttcaggttctaatagatagggaatgacatcagataagcgagtttcgaatcaaagtagtatagtcaagttacaaattagaagcagggtgcagtcttacttcagagatacaatcggttatgcatagagaactaacaacctgggcattgaacttactttattgaatcaaaacatgcttatcggtttgaaatcatcattatcccctatgaaaatgagcaatcctaaatgcaagtacactatatacaatcgtaaaatgatatgcaatctacatgacactctatttttgtgaaataattttctgaaattctttcaaatttttatggtttttctatccttagatgatgcaaaatttgaaataagaaaagagaacacaatgttaaacatgtcttgaaccctcctccaaacttcaattacacaatcccctgtgtaataaaaatctgaaagagaattcaagaccaaaacaaacaacacaaaaggaaaataaaaagctaatggtatgtacaatggttgaggtggtgttacctcagtaatcaggtgaagtaggaggagacaaaatcatccatactctcctttgtataactccaaggaacgggttatgctgaacttggatagctggatgctcgacccttttctcgggttgttgatcgagtggcccctcaagtggtgcggtagagtggcttactccagcatctgatttccttgttcttcttcgctttttcaacttgctcctcttttcctttctctaggtttgaaggatgattgccttggtggtgaaggtgcagcatggtgttccctcggctcatatgacgactgtcttggtggtgaaggcggatcgaaatgcataggttcatgacgagtggatccgcttctcccaaaaggcatgttatgtggcattgttgtagttgaagaagaacagttgatcttgagttggagattgttaaacttcttgttgagtgtcgcgagagccttgttgtggaacttacaccagctctggaggaaaccaaggcgcttgtgaatttcctttgagtctttactttgactcggtgcggagtactcctcaaagtaaaattgttgtgttgcgtaagacacgtccataggttctgcctcattatctgaatgatggattggggtctcatcattattcattccttccatcggcacaagttcatcacctgaaaaatagaggttctctaatggtggacaaaactcaatgttgccaccatctctaatcgaagtggaagcgggatttgggaggagaaaaatatattgtcctgctgtggggtgatcgaacctatacttatataggtcattcttctgctgcgaccaaaaactcttggaattgataaggtgttgcatatcaatccatctcgggggaatcggctttaaatgtagaggtacattgcaagctctcagaattagtgtcacaactcctcccacaaccattcttcctggtttcttaagtcccttagcccatcctctgtaacttagcaggtgcttgattaggtagaatgagaccgaagcgttagtctgatctccagctagaactataccatatgatgctaaaccaagcagctcttgtagagctgtctccatcaactctagttctccattgacaaaggtttcattcctctctcttgcaaatagcgtactagctaaggacctatgaaaatatctaaccaccagactccttattccgttgctcttggtcctaaaggatgaaaatccatgtttagacccaagtgtggcccagaatgactaaagctctctcttgtcaaaacgatgactcgtgtcttttccgcttagaaatccatacatcagctcgagatgctcgattggaagccgatactctacgtcatacacacagaactccaagtatcccaaacttccgtctggcctgatttcatcgtcctttgactctccatataagaacaattccacggatgaaagaaactggatggtctcttcctcatacccctccattggccgaaacatgtgaatattgaggttgcactgcttaaacatatagtctgcatcatcatagatgtcgagtctctccatggtctcgggatgagggtatcgagttcctaaaaacacattgcgcttcagcagcttgtagtactcgtttcgagttgcacacttttcttattccaaatcatcactgcctcctttctctatttgatcatcttcctctggtgaagccatttcttcctcggagttttcatctaccagttccaacctcctctccacgggcttctttcctcgagtgatatctgccttgttcctcgagaattcctttacagagggctgaaagtttttcttcttgcatcacttcctcctcttggctcgattcactgtgatcggtttcgaaacttgcttgttctctcctgctcaaccccaagggtgatggttcagaaggtactcgagctgctgcatgcgaagaaggtgttggatacctcttctatggggagagagcattgtttcgaatccttgacaaagcgagcgcttgttcgtcatcaagaacaaaagtgggagaaactcaaaaccaaaattcagtaggttaggagatggaatgatggaggaaacaaatgaattgcgaaaagtttttgataagaaagggaagtgaaggagataaagagagaattgtaaggattcgagattgctttggtatgggaggtgaagagatgaggttgttgagttcgggaattgcaatggggggaccaaagtgaatatgggggggcaagaagacaaaggtacaccagcttttcaatggaggcgggtcacgaggcgttggtgtctacaaagagggtgtctttggtttcttcactcgatcggacggtgagaaatgctccatctttaatcactcgatcaaacggatcagaatgaattgcaagaaatcactcgatcaaacggtggtgatgcttctctcatttggtcattcaaatcaacggctcaaaacactcctcctcattctactcgatcaacggttgagatctttctcgacttggtttgaatttactcgaccgttgactccataatgatcaatgaaataaacttgaaacacttaaacaaaaacatcaaaaataacaaggaaaatatatagttatgtacatggatagacatgggacttcctcccaagtgagcttgttttaagtcactaagcttgactcttatagagcttagtcagaaaagaggttgaagagaggaacagagaagtcctcatcttcaatggttgaattttcagtgcttgaatcatactatgcatcctctcttgagatatggtaggatgagtactcatttgatttttcttaaaagtaggcttctttctgatcagcagagtagtcttcttcttctgaaccaggctcctttgaccaatcctcaatttcaaagttggggtagtccttgaccatttcttgaagttcaagaatggtgctatttaactcttccatcttatgagttaaccttccaattgtatcctcctgagccttatatccaacctagagctctaggagttcttcagcaacagaatcatgaatcaagagttcttcttcagcagaggggttggtggttggtttaggtactcttggagaataagtcggaatagggatttcctcctcactcatcaacttgctctctaggcttctttcctctaagtgaactcctttctggtcttgtggtgcaaaccattctgttgtgaaatcttcgtcctccttgatagctagtgcagtttccatcttctttggatcaatagtatttgcaaactttttaactcttttttgaaatatccatagttgatctttcagcttcatcacccttgaagataatccctctatgactctgctttgccatttaaatttttttctcatctcataccagtcatcttctgtaggatcttcagtctgagctaacctttctattgctctcttcttatggtcaaaagttctcttcagcttgctgagttgagaagtatagttaactcttggtggggtttctgtttctgtttcttcatcattatccatgtcctgaatcccaaaactctgacctactgttgttgatttccctgaagcttctctgatgtcgaacttcatcttgatgcctttttcaaggttcagattaatttttccattcctgacatctatgactgctccagctgaagctaagaatggtctgcctaggatcaggggatccttgccttcttcatccacgtccaataccacaaaatctgtaggtatctcaacatttccaatcttgacaggcagattttctattagaccatgaggatgtgcaacagaaccatcagctaagagtaaagctaagttgcagaacttgtattccatgatccgtagccttttagctgtagagagaggcataaggctaaaagatgctcccaaatcacaaaggcacctattgaatgtcaatggtcttagagagcatggtagagtgaatgaaactggatcatcaagcttttcttggatgactttcttcttgtatgtttcttgggtggaggcactgctaatggtgagtattcagcaaaggtgtgtgctctataatctagttgaattgttgggtggcaggtgcagcaatttgagttgaatccccccccccttcttgaaccatactgtcctcagtattgagggtttgatgacttggtggggactcatcttcttggtggatggtgatagcattagcagtagcatagtccttaggattatggactgctttccctggaagttgttgaggatgcttcggagcagaggttgatgcaaattgactctccacatacttgatttttgaattcagagcttcgaacttgacatttagatcattgtaagaacgatcgatcttgttgtgtaattcagctatcttcttgtcaaaagccatagctccagtagcttttccttgaatgatctgttgaataagttgcccaatttcaggatcttgagctggtggggcttgttgtggattctgctgttggtagtctccattaaactgttgtttagggacataaccttggttgtactgaacaaaagtcttgggaatgattctgttgtggtggatacacttgatcttgggggttagctacattggtgcttctgtaggagaggtttgggttgggcttgtagttgttgtaccccttgttgaaccctccttggttctggatgtaacacagcccttcagtttgccccccttcttgcatttggaagttctcttcatcagtgatatagtgtatatgcttctgctgaggcagcaacaccttgtctagcttttcattcagagccttgatatccttgctctgtttatcctcactacctccaattcctcttactgagcgatcatagtcttcattgtagcacccatcagattgtgctagatttttgaccaactcccatccttctgctacatccttgttcaggaagtttccatttgagggagtgtcgagaagcattctgatctttggtaaagctcctctgtagagtgtgctcaataatgaagctttcttgaaaccgtgatggaggcactgagtggtgtagcttttcaacctctcccaagcttcacagaaagtttcattgttttactgtgtgaagcctgagatctcgttcctcaatctaggggtgcgagcgttagagaagaacttggcaagaaaagctttcttacaatcatcccaagagttgatggagtctaggggtagagtcttctcccagtggtgtgccttgtctcccaaagagaagggaaatagtctgagcttaaacatatcctcagtgacaccattgatcttggtaaagccacagagcctatcaaagctgtcaaggtggtccatgggctcttccataggtaaaccatgaaacttgtttccttggatcattgagttgagaccactcttgatctcaaagtttttgttctgaactggtggaggcactatcccttgtctttggtgatgattccttggggcatcaccagcaccaatgtttcatggttgatcaacattaggtgggtcttgaacatcaactactctgttctgttgatccatagcagctggtctttgctgatcacatgctgcctttgctttggtttcttgtaactcacgagctattctgtcaattctgtctctgaatggtagtaggtgtgcagaacctttggaccgagtttgcatgcacaaagattagtaccaataccacaaaaacaagcagacgaaatgatgagtttgtaacttgataaatgtaaaagaacataatcttaactttttctgatatcttgaatgtaacaatgtaacaatgaattggcaactgcgccaaattgataagcaggttttttaggcctacttatttgctgaagggtgtgaggttcagttcaattcccctacaaacactaacatgtcgatgcagctatagtgggtgtcaatccagtccactgttattgctagcaatcaagatgtgtacataagcaactaagtcaagccagattataatgatggtgggtttctagtaacaatcctaggtcaagattcaaacacgaaaatgagaactttaagagccctactcgatcattgggtcgtgtagaaccaacaggcaacaaaattaagtaactaaaatgcaatcaacaaaggatacaaataacaggtaaataaaagtgcaatcaacaggggatacaaataaatctaatagaagttctaaggatggattcattgataagggcaactctcgggttcatcagatggctaacaggtgaaaggtagatacccttgacgatagattcaaaaactgggtcaatccactgtcgtgacaaagaccgccataacactaccacttcctaatctcaactgtcgttgatgaaacatagaagagcagggtttaagaaacaatctaccaaagccaataagcagacaagccaatgtcttggtcgagtctacaaatatctggaattcgtagatcagacatccatttgaacgtcttttggatgctagacgtctatgatcgaatctccacattagccagcaaaaaccgcataggggccaagcgaatccagaagggttctaacctaatcttaaccacctaactaacgtagagattaccctaatctaatccatcctcaagaaccctaatcactactcaagcaacattctcaagaacacaaacccaaaatttactcaaatcatatcaaaacgtagatctaaacaagctaaacaactttactaaaacaactaaatgcaaaatcaaaatatattaagagtaattaagttttcaagatttataaagacaaagaaaaactaaaggataaatgctagatcctttggacaaatcccaaagttatatatttatagtaaaatgttgaaaccctagattcactagaagaaaagagacttgaggcggtttgggcggatgctcgatcttggggatcgagtaaagagggtgctgcaaagtttgcgcctttgtgtctatgctctgatcaattggtcgagtagatgattcttcctctcctatctgtatgctcagatgtctggttgagtggggaatgaggaggatccgaagttgctttgatagatcaacaagtcttgtagagttggtcacccttggtcgagtaaatgggtcgagtagaggatcgagtaggaggggcgagtagatcaatctgctgcttctactgaggctgccttgatcgagtaagagggtcgagtgaactgcaacctcctctgtagctgcctggatcgagtaaagaggttaagtagaattcttttaagcttcttctgcacctgaaaacacaccaaaacatgcaagtgtatgcaagatgatcctaaatgcctaagtatgcaaaataagctaaaatggtgcaaaatgatatgatacaatgagcaaatgcaaagctaaatgatgataaacgcacacctaaaatgagtaaaatacagtgttatcatagtgactctattggctttaaacccattctcctcaaagtgaataagatttgcttttttggtaggcctttaattaaaggatcaaccaaggtttcctttgatctaatataatccaatgctatcaccccactggaacgcatttgtcgtatgtagcatgtctccttcgaatatgccttaacttgtcattgaaatttttattcttcgctatgtttaaggctgtcatattatcaaaatggatacatagtacagttaacggctttgaccatagtggaatatcttaaataaaattcttcagccattttactttttctaaagtactatcttgtggatgtcagattcgcacactcatttattaatttatttatgggactaaaaacactcaaaaccaaaatataatgtaaatgcgataaacaaaaactatgaataatgtttgaaaagaacgaataagaatagtgatagtagtagatcttgtaatcaagaaaaatgcatatgtccccaatgtacttgggggctctatatttatacaatatgatttacaattattgaccattaaccatcatgaattctctttaatatgtccgtttcgatttctaaattaatgtcttaacgtctctatttgaattcttgtagcctctttatagacttctcgacattcggcccattacccattctcaaactgctgcctctttccctgaagtcttcacttcgtgggattgagaatatcacttcggttcggtattaaatctcagttgactttccctctcgttcaccttatgcttacgtggcaatcttcggtttggttcaaacttgggttcaggatccgacactaacaattagctccccaagtcttctgagctgacacgccagtttgaggactttatttccttaatgacgaatattgcacaacacgatctccaatttcccgcctttttagccatcaattccctttatttttggactacccatatttacacacatgacatcaattccctcttccacttctcacacgactctagaggcggtttcattctcagccacaagtttgtataaggtatatatttattcttctttctcttatgtgtttttaccttgttttttttctcttcaagacaaaaattcgaatatttttattctttctactactcatgaaattatgaacccttcatatccgacaagaagccttgactcctcagccaaaaggcccaactcacttccgatgacgagaaccctcctcgctggtttgtcaactgctctactaacccaaacaacatagctagtcctcattatacatcagggtgtacccttcagtctcttgactagctctcttggttatgtcggattctgactaagtttattcaagaatccaaacactcttttcctaccgaatcgccagagaactatcgcctggggtacttctggtttactagatctattttaagggatgcatactgaccttcctgcatgttcccaaatcgtttgtctaattccttggaatcatcactgcggtagccgaagctaggtatatcatagcttcctttgggttgttcgaaggtggttcttgttccatagaaatccctaaaaggtaaaaaatttgtttttttttctttttttttttctttttgacgaatgcttccttcaccttcttagagtccctgattccctcagggatggagacagaagggaacatatttagaagcttcaagatccgtaaggggcttactttcggggtttgaaaagtggcgtcccgagctctgtgaacgcttcttgcttcatgcttatcattcatccaaggttagatacatctcgacctctgttctttaacggttttatcttcataacaataatgcattttaaacgcctacccatacactcgctgttatttttttaaggccaatgaaatcatcaacgatatgatcgaatactatgagggccttcttcaagacaaggaaatcgagctggacaataggaacaagaaattctcttctcttgacaaggaccaccaaaccttatctgactctttgaagaagaaccaagaaaagatcaaacacgtcgatctcgttgaagatgagctatcaagggtaaacgaggagttttatacctactattggagcgtcaacgacttgcaaagagattggttagatgctagggatgaaacttctcactttgaggaagaggctcgaacttccacaaacaacctggaggaactgaatttgaagtaccagtcattggtcaagttcatggagcgtgatttggcaaaatctgccacaaaagctaggaagggagttaagggtcgttgtagcaccccgtatgcggaagtagaaatctgggaagctaagggcaagataaaactttcgtgtaagctaagttccatggaagggtaagggaaaggagaagtccatggaagaagaaaaacttagctggaggacagagacgagaaggaaggtcattatttcacattcgcttcaaacccgtcaatgaagccccccaagttaaacacaaaagtgaaactcacggaccgcgtttccaaagatccatcgagctcctttcgattcacagtcgtatcttgagaaaggtaatcggatgccatggcctttgtgcgaaccaaggatgctcggtctagaccgaatcgagaaaacttgatccaggagagtggtttccaaagcattgagaaccaagaagaaattagaatagaaaggaaatattcggaataggaggaatgattcaatcgtttaaaggatcgaatcgagttttcccgattaagcttctaaggaaaagaacttaagaatcagaagagtttctaatgaaaggaactttagtaatctttagaagaaaggcaaagcaaagttatctaagtgttgggaaagctaaggaagagtgagtgcgagttatatagagtggtgaagggttgagccatgcaaaggagccgaacgaaggaaacttggtgaccaagtcggctcgcttggagccaaaggcgagaagaattggtgccctagttccttggtcggacgccatacaaggaatgcgccatatgtcgttgccatgcccaagggcgttacagtcgtggtatggatttaattcagaaggccatcaagttccttcaatttaacaaaactcggactaagttggagtcagacatcaaggaggctaaaagcaatctgattcttgtgagccaaacccacgaggaggacttttctgaagatcaagagattgtcgagctaaacaagaatttaggcttctggaaagaccagctcgcctcccttcctatctcgaacttcgaccctcaacactttgcacattcttcaccgcgtctcctgtttcgtgaaagacatcgctacggaggtttatctagcgcatgttcaagcaggcgggggggctggagaagttatgcgggtggagagactggttgcatgggctctgccaccggggaattggctgaaactaaatacggatggcgcttctcatgggaactagagttagagatcgattcagcattagtggtggattttctcaagacggggataagtgagacacatcccttgtcgttcctagtacgtttgtgctacggcttattatcaaaggactggttagtccgaatttcacatgtgtatagggaggctaatcagctcgcggatggattggcgaactatgccttctctctaccgttaggattacatctttttgattcttgcccagattgtatgttacattgtttggcagaggatgatcgaggggctgcgcacccgagacaaatccgtgtgtaagctttattttcttcattaataaatagagggagacactgtctcctctcgacttaccaaaaaaaaaccaaaaagtgactgtcctcatagaggaagaatgtgatgaaaatgatctctccataatggaaatggtggtgaaataatctctcaaaagaagagaaagttggtggaattgataaacgtagacgttgatccaatttggtatacaattcgatgaaacatctagttagaaatatgacgagatattactgtcccactctaaatttgatcaagtatctagtcaaatgatcaatcaacaatcatctttggatctcatgcggttgcgaaaaaaatcaaaatttgaattaaaggtagaccaaggattaactgtaaaaatggtatgggaatataaatatactagataagattcacctatttagtcggtgtataaatgtaaatttttattgatagtatttaaattttggataataaaatagtaatctactcgttgtttttctatttaatttattaatttttgttttaaacaaaatttcagtattatgcattatattatattatacatttcaatacaacacattcaatctcattgatgatatttgcattctaaaatagtaatctacacacttttctatacttaatttagtatttagaaaacaaattttcgtttggatatacttctatccattgctcctattagattggatatactactatcctccatccacttttgaagcctcaagtcactcagcctcgtctgaatcaatcttcctcctaccaattccaggagagttctcccgcttctttctcctgtttatcagagggaatctttcaaacaccatccttgtttccatggcgattttgttgttgcgcttgtgtcacacaaccatcccctattatgaacgatgctcttcagagaccgtgttctctaggggtttcaacggctcatcagttcggtgcttcgtcacctctgtcttgccagccaaatttaagattgttttgtctgtcctagtagcagattcaatctcgagtaacctagcactttgtgtgttttgtgtggcgtcatctcacttattcgctctagtgttatcagtgttaggactgcttttatctatctttctatgagcttttatcttgctttccaatttgcttttggatcagggagtttgttagctttggctcctccctttgtaacatttccctcttttgaggatgattagtatggtattaaatcttggtacacaaaaaaaaaaaaatttcatctcacacattctattttgcaatacattcgtaaactatctatttcaattcataataataaactcatttgaattctacagacttcatcttaagtgataacaagttcatatcaaaataatatttatatccgataaaatctatatcatagttaataaaataattaagaattaagaaaacataattaagaaaaaaaaacaaaaatccattaaaaaaatataaaagaaacatattaaatttttataatttttatatatggcataatctcgttagttaattttaccacatgcaaaataaatttagtgagttataattaataaattaaaatttactaaattctcgttaagttattgaaaagtcaatcctagaaactatttttatcaacaaaaaaaaaattatgttttcatttataactacatgcgttaaaattctaagaataaaacataagtataagtttgcagtttttgatgcaaaaccttccatcgtaggatacgttgaaattctaaaaataaaataacaattgttaggttatacgaattgagaattcaaaaaagattaagtagcaagatatggggaaaacggctaaaatcaaccccaactctgaccccctgtacttaccaatccaaaccttcataaatttaaataataaacctgaactatataattagtagccaattttaacaaatacatgttattatataatgtaacaaatatgaattatgtaacctttaaccagttgaataaaatgaatgactcatatataaaagaacaaataattacgacttaacaattctaatcgatattaacaaatacaaaaaataatgttaaaattggctaatgattacatagttcaagtttattatttaaaatttatgtggattcgggttaataagggcaggagatcagagtttggattgaaaaaacccgcataaaaatagttggagttgattttggcattttttagcaaaaatatgctcgagaacctttaaagttttgcagagctaagtgaagaaaagcctgagcagagagaaaaagacgtaagtggaaatgggagatgagttatcttacatactatagattattccaaaatcctcggtaattaaatcaaattcccggttacagtttgcagctcaccatttcagttctatagattaataaggaggtattcagtcaatcatttggaataatttgtgttaagatgacaaattagatgttataaatgtcgaaaaatctcatgattttaaggtaaaaatacattaaaacacaatgtttttctactaataatattttataaattcaatattttgttgcacactaaaaataaaccaccaatcttgtaattgacttggcccggctctttcctgatttttagttttctttgttttagttagtttagtaaaaactatttttagtacatgtgttaagtatattttattatgagtgtatataaagaaaaaactatataacaataataagtttaagactaaaaaatactgcaagtaaatacgactttgtttatctttttgaatcatgagatcaatcacttggtttatagttttctgtgttttcatgttcatcgctttaaaccatgttaaaggtaacatattatcttttgattcagattttttatttgcaccaagaaaaaatatttattgattatttatatatgaaaaacttgtattaaattttaaatatcttgttctataaatctttacccaatactttatctacattttaaatctattttatggttaattgaaaataggacaagtgaaaccaacaggatgtcaaggtggacaaaggtaccgtggaaaatgtggcactaacggaaccaagacgtgcgtaaaagatatgatgctacctaaactatttaaaactaagcgttgtgattgtcaagacatgcttgggacattcaagggctggcatttctgcacatgttacagtggtcgtcctggttgctaagtttcactaatagctataaaataaaaatctatttactaatacctataagagaaataacaagaatttcaagtgttttggtgttgatctaacatatgatatatatagccttctgtttcttagttatttttttactctgataaagtagaaaaaatcatgagttaatattctaaaagtagtatatacgcgcatctcaataaatccattttttctttcattctttgggttaacttgatgtatagtgctggataataacaaaagaaaaaaaaactttaagtattttaccatctcataattagtaattctttattccattatataactaattatatcttataagttttgtgacattattgagagagtgttttagtgttgttgacgacaaactctatttttattttgtgtgttggtgtaggaattagcatcttcgacaacaccaacttaaatcgaaggaagtacaaattaaactgagaattcaactattctggagtatccaagttaaacatgttaatgggccaaaataaggagatcgccagacgattttggtgaaaacaaggaagtcgccatacgatctcgatccaaattaggaagatcgcccaaccgacttcccaatttgaggaaaaagaagctttcctttttgataaaggagaatggtgaaaagaatggaatatataaaatttaggaggggttattggtttatagatttataaggaattggaaatccaaacaaaaataatttgttattcaatcattgattttaaaattctaattaaaatcatgttattgatttgatgatttataaatactagttaaaattctttattattcgtttagtcatttgtttttggatttgagaatccaaattatgttttaaatggaattgaatggatatgaaagagaaaaatagaaggactcaaatccatgggtaaacacatgttattttaaaatccatatatcttgatttcataattaatagagattttcagattctatatagatttacaaatcaataaaccaataacacctctttaagctccgaagaattcgaagtttagcttatctttaaaccgtcttaataatgtatatatagaagggtttgtcctctatttttggcatccgcaatttaatactaaaaactctagttttctacattgttcttaagcacaacaaatatattattgatgtattttaagatcaatgtatttgtttgttaaatttgaaagtgattaaagagtaaatcattatttgattatactagtgagtttagaacaaaaatattaagtacatttcttttactttctataaattacctaatattacatatctacgaattatctcatatgaaaatatgctttagatctccaaaatcttaggaccaatcctgtacatatataatcttgtgtcagcccagtacatatataatcttatgaatacaaagactcatcgttaacgctgaattacatatctccttcgtaccattccttcaggtcttccatggcttccgaatcaacatggactccagctgacttcggaaggttcgagattatgctatcattgtcaacaccagacaaagtagactttggatacattgccaagtatctgggaaagcctgtagaagaggtcgtaaaccaatacaacgagctcttgagctcgaatgatccgacgatgcaaaggtaagagattatttcttgttcttgggttatttttgctaatttcttgaccaatctaaatgaaatatgaatatgaatgatccaaaaaaggcgaaaaatgttttttcaaatatgtaaaagtgtatgtatattggttttctgtaccaaaactgtcttatggtatgctttttagtacttctccggttattgaggttttggtattgctactacatggacaaataactttatatagtcagttgcaatctaacatgattactcgaagccaatttgcaaatacgaaagaaaaaacaaagttacaacaaaactgacgacaaaccactgaactataaactcttttcacggatttattagcaccaaattacctgatcttatcgtcgacggatgataagaaaatgaataattatactacaaattttactacagatctctaaatatatactccataaaatgtataatcactagatatttatacaaaagacaaaattacttcactaataaaattatgcaacttactttacgatatttccaaaattcaactctcaagacaatatgaagacaaactcatcaattacacaatatgaagaggttgccgactcaatacttcaatatcgagccaaaatcatcaatcccccaagagataaagtttgcctattcaagacaccaaaaagacaaaatcattagtcaatgaaagcttactcaacatttaaggtgccacatcaaggattatgcaagacaacttatgtatcatttgtataaataaaaaagaaagagtgtgtagagagtagagtgaattttcagagatcattttacaaactcccttcatacttgttcttactctcaaagcttttaatctttgttcttgtattttgaatcttgtattttctatccaatttaataaagtaagttttaatcatataattttttatacctttactctttaataactttcaaagttatatctttgtacaacaactaatatataattttatttatattataaaatctgggttttaagacgaactttatcctaaaaagaacaatggtactttgacccattgtcttgtttctttcatcgaaggtctttctttgggctttctaaaaaggtattacatgccaagttcggcctcacggtctaaaagctgtcaagtcatatagttttaaccaaaaaaaaaagagagatgcaacacgaggacttcccgggaggtcagccatcctagtactactctcgcccaaacacgcttaactgcggatatctgacgggatccggtgcattagtacctaaaggtcaatgtagaaaacacatccactataaatatgaaggttcttggtttatagttttctttgttttcatgttcatcgctttaaaccatgttaaaggtaacatattatcttttgattcagattttttatttgcaccaagaaaaaatatctattgattatttatatatgaaaagctggtgttaagtttttaatctcttgttctataaatgtttacataatactttatctacattttaaatctattttttggttaattaaacatcaaaccttttgggcgtaaacaagtctctagcttgatcaagaaacaaaattttcttattctgtttgccagacctaatgtaattcactactctcacacattttcttcaaaagaaatctttctatttctacaagatcatatatatctcatgcaatgcatataatttatatatatatttgaatatctggaagttcaagcccgaaaaccttacatctcctagtggcgggatcatattaaatttatttcctttggagaagagatctctcactcgaatgtcgaaactaggagatttaccactaggtcaaccccacattggtttaatatatatatttttttgtctacatcaatatagtagattaatgtcattttatggttaaatatttctaaaattattcgatcaggatttttgtttatgaatataaagatacaaaccaatgtttattaaatttttaacaatttattgtccagtagattttaataaacttggaggaagaggataaagaagactcacttcattaccacatgaagatgatcgggctacatcgtcgggttgataagcatgagtcgtggcaaagcaatacacattcttaagaacctacacatctgtgaggattttcattcgtccatcaaactcatctccaaagtttagaagagaaagtttagaccggaattattttcaccatttctaagatggctcatgcttttgcattgattattggtgaaagtaaaccggaagacggaagactctttccctgtgcatacacatgctctattttatttttattttggctcaacattgataaaaattgattttgtttttagttagtagtttttttttcttgtcgtattttagttagtagtttagaaactatcattcaagaaatcaaaatttgctttaaattgataaaattgacaataaagataaatggtgaactaagtctcaaaagtcaaaactatcattcaagaaaatatcaaaaaaattctttagattgataagaaacagcgtaggagaatgagaaaagtggatggaacaaatacttcaagtttacttaactgtttgaaccaaaatttctgtttaaaaagaaaaacaacatcgttttggaattttaacagaaactgttgacgactttactttgtttaattagtctgtcacttgacttaacaataccctaaatttggtaaagtcaaagaaacttcataattaataataaaattaattaaaattggtaatttaattcacccaaaacaaaattgacattttttttcaaactgatgttttttgtcgtcaaacttttcattaaaatccaaagaggattacaaggtgataaagagcccaattacacaaaagataaactcaattagcccaaaattacaagaagaaacaagagaacataggtctaaaagggacacgtgtgaagatacgtgtattgatgcatgctggaagtggaaaggcacagccaccaccatctccaccgagctgaaccaccgatcaatccttcgactttcaccatagaaaagctttttctgaccaaggattttaccgatcttcagcttcaaactccaatcaccttgctttgctaccttttgctaaactctccgattgtaaaaaacagagattagcaagccatcagatctatgaaacacgggaagacgcagcgggcgagagggcaaatcagtcgtaaacacactctcttgatatgttctgcaccagccaacgaaatcctctcaacacgatttgaaaccttgaggtgataccttcttccaattccgattacggccacgattaggatatgaaggatttattcttctcatgatcgaaatcgagcagccaatgatcttaaaaactctcaattaaacgttcggattttgattcttctttactggaagagaatttagattctgcaaaaggattgaggaaacaaaatcaaaatagccaaaacggctaaaagagaactcacgcttaggtgagaaggtacatatccggatttagccggcaaagaactgattttaattggaaaacaaaaaatacataaagcttcctctctctaaaggatatgagagagataagagagagaagcttttttaaaggttgcggtaatggaccgactttcaaactgatgttttaaataatatttttctgctaaataataaacaaaaacatataaataaaaaaaatacacaaccacgaacgatcgacaattgggctcaatcggatggaaaacccacatagcattcatttaattcatataaaaaccatttcagcgagaaaaaatgtaattgggcttttccttaccggatttgaaagtgagcccaatagatataaaccctaagaactcagtaattaaagcccaaaacgacaaaaccccgttttcttcgttttacttaaaagaaaacaaagctcccgccgccgccgttatcacgacgaccaccgtgcgataccctaaatttcaacgttgattccactttgtcaagtttgtatctttcccactttgattccgatttgttaaagatttgcagattaaaagttttctttttgaagaaatccatgagtgcccaaatggaagaaccagagactctcggcaaaagaaaagaatctgaaagttcaaaacttcgttctgatgaaactccgacgccagaaccaagaacgaagcgtagaagtcttaaacgtgcttgtgtacatgaagttgctgttcctaatgattacacaccaacgaaagaagagacgattcatgggacgcttgataatcctgtcttcaatggagacatggccaagacttatccttttaagcttgacccttttcaaagtgtatctgtagcttgtttagagagaaaagaatcgattttggtatctgctcatacttcagctggtaaaactgctgttgctgagtatgctattgcaatggcgtttagagataagcagagagttatttacacttctcctttgaaagctttgagtaatcagaagtatagagagttgcaacatgagtttaaagatgttggtttgatgactggtgatgttactctttcacctaatgctagttgtttggttatgactactgagatcttgagagctatgctttatagaggatctgaagtgttaaaggaggtcgcttgggttatttttgatgagattcattatatgaaggatagagaaagaggagttgtttgggaagagagtattattttcctgcctcctgctattaagatggtattcctttctgcgactatgtcgaatgctactgaatttgcggaatggatatgttatttgcacaagcagccatgtcatgttgtgtacacagattttaggccaacacctctgcagcattatgcttttcctatgggtgggggtggactgtaccttgtggttgatgataatgagcagtttcgggaggatagtttcgttaagatgcaggatactttccccaaaccgaaatctaatgatgggaaaaagagtgcgaatggcaaatctggtggtaggggtgctaaaggtggaggtggccctggtgattctgatgtttacaaaattgtaaaggtatgtatattaattatggttgtcctatgttgctgcttgtggcgccgatcacacgtcatacttctgctcttgaagttttactttactgctctgaggtagtaccaagagtgtagtatcaaggcacaagttatatattgactcttatttgttgttgcagatgatcatggagagaaaatttgaaccagtcattatcttcagcttcagtagaagagagtgtgaacagcatgcattgtcaatgtcaaaactcgattttaatacagatgaagagaaagaagttgtggaacaggtgtttaataatgcaatgcagtgcttgaatgaagaggatagatccttacctgccattgaactgatgttgccactgctccaacgtggtattgctgtccatcattctggtcttcttcctgtcatcaaggaattagtggagcttctttttcaggaaggacttgtgaaagcgctttttgccacagaaaccgtaaatgttttggaattagcttgtctttttcagctgttaaacgctcttttgtgctaattaatgattgttcctcaaatgctgctcttgtaacagtttgctatgggtttgaatatgcccgccaaaactgtagtgtttactgctgttaagaagtgggatggtgacagccatcgttacattgggtctggtgaatatatccaggtgggtggtagtttgttgacgtaagtggtgaatttgatgtaatatcacaaaatgatattgtagtaattgtctgtttatattgaatgcttgtagatgagcggcagggctggacgtcgtggaaaggacgagcgtggcatctgcattattatgattgatgaacaggtaattttataagtaatttgattggagataattacatcaattaccggcaaccaactagtaattcccatccaggaagatccgatatatctctactgagtatagttatatgacataggaatatacggcatcctttattattttcaaattatatgcattaaaggatagcatcttttatactgtcttcgaagaggatcctttattatctctactgagtatagttatatgacataggataattttcatttgttcttcaacagatggagatgaatacactcagggacatgatgttgggaaaaccagcccctttgcttagtacttttaggctgagttactacacaattttgaatctattgagtcgtgccgaaggacaatttactgctgagcatgttataaggcactcgttccatcaattccagcatgaaaaggtagctgttggatggtccttttactctctaaattttatctacaaattttttatgctaatttacgctggtgttccaacctcaggctttaccggatattgggaataaggtgtccaaacttgaagaggaagctgccattcttaacgcttctggagaggtgctctcaggaaattataatatgacgtctgtaagattatttgggtctgttctcacttctttaattattcgcaggcggaggttgctgaataccataatctacaatttgacattgctaaacatgaaaagaaacttatgtcagaaataattaggcctgaaagggtgctttgttttcttgatactggtcggctggtaagtatacattaagttcagattcttgatcaaagcctagagatataagtcattgattccattctgcaacctgcaagtggtagattggtttctttgttattactccttatgttgggaaaaaatatcacgttctaaagctatagtatacttcactctaaatgatttactgattataatctcatataagttctcatctatgatcagacaagaaaagttagtaaccaagctctacaatatgttttcctctctagctatggtcataggttgtacccagatcgttacatgttaatcaccttcgtataatgtttaaaagttgaatgctcatgggttgttccatcatgcttttcctctaggttatgacaaaaaattctttgatggtttgttactttggtcaaaaattaaagctaattatacagtggaaatgtattgtatatttgtatatgactgtaagtatttgaaacaacaggagcttcacagtaactttatgggacaagtgttttatgtgtaggttaaaataagagaaggtggaacggattggggctggggagttgtcgttaatgttgtaaaaaattcttcagttggaactggttccgcctcttcacatggtggcggatatatagtggatactctacttcattgctctactggttttagtgaaaatggcgcaaagccaaagccatgtcctccccgtgctggggaaaagggtgaaatgcatgtggtgagcacattttcattgtcactggacttacatgttattatatttgcatgagtgctggagttttgagaattttgcttttgcgtttttcaggttcctgttcagctacccttaatttctgctttgagcagactaaggatatcagttccttctgatcttcggccagtggaagcaagacagagtatactacttgcattacaggagttgtcaagtcgcttccctctagggttcccaaaactccatccagtcaaggtttctttttaagctgttaaagtagtgctatcttcgatgaaaggctttacacaatcttttaacttactgccaatatgcataaatcatatgcttgttgattttttgttgtctaaaatgactgaaatgccttccttttgtctaaaatgacagtgtatatggactcatcgatgtcgtattgcttactgtgttttatgctaggctttaatttttgaagtaataaattagtagaagatggcattcaggtttcattggttttataataatctacaggatatgaatattcaagacacagagatagtggatctggtcagccaaatcgaagaagttgagcagaagttacttgctcatccgatgcacaaggtcgtgctaaatgtagtatttctttgagcttctgaacttaaagaaaagaagacaaaatattgtgaaagcatattaagaacttaaacaatatattaatatttctattgtctcattttttatgtgttgcagtctgaagatgatcaacaaatcaagagtttccagaggaaagcggaggtgaattatgaaattcaacagctaaaatcgaaaatgcgtgattcccaggtatattacttactctctcacccatgagtaaatgatgcatggaatcctttattatgtgtgtcctatctgcaaggaatatctcctttccagtagggttgttacttggcatgataaattctgcttgtatccaatttgtactgctttcgattttcctatacttttttcccgtttagctacgtatagactaaaacaatataatagggagacgaacttttacgtttaaaagcaaacaaattgtagaatgttcattgattactagactcactgctagagtttaagatttcttttcatccctcttgtgtcttacagcatattttttttttttatctctgcagctccaaaagtttcgagatgagcttaagaaccgatctcgggtattaaagaaacttggacacattgatgctgatggtgtcgtccaggtaaagggacgagctgcgtgcttgatagacacaggggatgaattgcttgtcactgaactgatgtttaatggtatgacaactgctttagctacacagttctaagtgtaggccttttaggtgactgaggcagtgtataatggttgtatcacactatatataattgcgttgtgtgttccttacctaccaggtacttttaatgatctggatcatcaccaagtagcagcccttgcaagctgtttcattcctgttgataaatcaaacgaacaggtaaatttaaggaatgaacttaccaaaccattgcagcagctccaagatagtgcacggaaaatagcagaggtaatttaatttcccagctgaaagcttgtttatttatctgtgcgagctattactttttggattcctcattgttttgtgatgccagatacaacatgaatgcaaactggaaattgacgtggaagagtatgtggaatccaccatcaggcctttcctgatggatgttatctactcttggtcaaaggttggtattacttaaatctcagaaatactgattttttttaacagacatgagagtactttctgtggataaacatgtgttaataattaccctattttctcagtagaatcaagggattattcgatagaatacccaactctcctgaaccacctttacccactagtccaagtttgtagatgcactctttattgtaatctcttactctagctaacttgactactatatgtcatggagatagtaagcctctgagagtctgaggtctctttatgtcttataagcttaaaaaatgaaaacctgagtaataacttcgtacatgttaggaacaacttctgtattatgcacagtgaatgtcaatttgttcattcttggatcttgagctcaacagaaatttgatattcttgattatttctctttgaaagggcgcaagctttgcagagattatacaaatgactgacatattcgaaggtagtatcatcagaagtgctagaagactcgacgagtttttgaaccaggtaatgtcaccaaactctgcaattacctttctctaaacctctaagaaatccgatgacactttgattggtgatttccttcagcttcgagctgcagcagaggcagttggtgaaagcagtttagagagcaagtttgcagctgctagcgagagcttgcgacgaggtattatgtttgcaaattcgctttacttgtaagtactctcttggagaatacagcttgctgtattgggtaaccatgggacacagcatgttgaaacataacttcatagagaaatgcttgtttgtactttcctatgtatctcgaatcgcgacgatagctctttgtttgccaacaagttagataatgaagaaatttgcagagctcataaggtatctgattatattctaatttaaccagcttgaggctgggatagcttggtggtttcaacatagttgttttgcttttacttccatgaattaggcttcaacaaaatgaatcagagagagtatgaaagtgaagtagatatccaaataagttattctcgttgcaaagcatttaaaataaatcacgtatattttatgaggtcgtttgtattctgtaacatccccgttcacgaaaaagaattgacccatatattgcaattttaccttaaaaatttgataaaatgcaagatggttatattaaagaagtcgaaaaaataattaatgacaagtgaatcctcctatagcgaataattaattacctcacaactcaaacgctcttgtgcttctaatccagcgagatggaatcaagacaaaaatgcctagatcctcacacttctcccggaaacgatgatgtcgaaaagacgactttgaaacgtctcggtagaaacctttaaattaagcagatctcgagatctcgatcagatcttttgagtcgagacaaggagcgatcaccaatctaaccgggtcacaccgaactcacacaagcatggcaagagatcaaaccagaaagacagtaagacaaaatccagtagtaaacagagaagtacaatccggctacaactaaacctaaacgatgactcaactaacgatgtattaaaaacttgtggcctcactattattgggcttcaaaaagattaacagcccaatgttaaattgagcccagatggaggattactttagttttatactatattatggataaaggacatgacatcatcatcagaaaaccacaaagtcccaccttatttaactgaaatattaaccactccaacaacaagccacgtgtcaaacctttcttcatatgaaggaaagaatccaccattccaaagcagcatgaagcatcacgatgacgtaagcaaccaaaaagattttccggtgagacttaacgtcgcctttcccatcaagcaaaactgcttcaaaatttgaacgacaaggcttatgaagcccagactcttaaacttccactctttcttcctaatgaagaaacttgataagattattagaaacaaaggcaaagcgctaaagaacggcgatgacaaaccggattcaccggtaactatacctagaactcaccgtacggtattgaaacgacaaagttagacctcgtccgaacacaagctcgcaaacataccagacggcatatgaaacaaattattggggatagagtagaatctcttgtgatatattttgtgacagagttatgtcctataatttagggattcgagtttattttatacgatgactctcttgtataaatatcacactttgtgaatcaataaactcaagttagtgcaatacctaattctacatggtatcagagctctaaagatctaaacctataaaaaatttcgtttcttattcgatagtttcgaattcgtttccgcttttctctttaaaaccttgtttcttgcatgtcaagaaatcatgtctattccagaagaagtctcctctgcaacacatccacgtaccaatcaacaaccagatgtaaccaaagtgtctccgtacactctggccagctccgacaacccaggggccatgatttcctctgttatgttaaccggtgacaattacaacgagtggtcaacaaaaatgttgaatgcacttcaagccaaacgtaaaactggttttatcaatggttcaatctcaaaaccaccattggataatccggattatgagaattggcaggcggtaaactcaatgatcgtgggttggattagagcctccatagaaccaaaagtcaaatccacggtcaccttcatatgtgatgctcatcaactatggagtgaattaaaacaacgtttctctgtgggaaacaaagttcatgttcaccaaattaagactcagcttgctgcgtgtaggcaagatggacaacctgttattgactactatggtcgcttgtgtaagctttgggaagaatttcaaatttacaaaccaattactgtttgtaagtgtggcttgtgtacctgtggtgctactcttgaaccttccaaagaaagagaagaagagaagattcatcagtttgtgttaggactcgatgattcacgctttggagggctctctgctacacttatcgcgatggatccgtttccatctcttggagaaatctactctcgtgttgtgagagaagaacagagactcgcatcagttcagattagagagcaacaacagtcggcgattgggtttcttactcgtcaatcagaagttacagccgatggaaggactgattcttcgattatcaagtctcgtgaccgctctgttctctgctcacattgtgggcgaagtggtcatgagaagaaagattgctggcagatagtcgggtttcctgattggtggacagagcgaaccaatggaggtggacgaggatcaagttctcgtggtcgaggaggacgtagctcgggttctaataactcaggtcggggtagaggacaagtcactgcggctcacgctacaacctccaatctctcaccctttccagaattcacaccggatcagttgcgggttattacgcagatgattcagaataaaaacaatggcacctccgataaattgtctggtaagatgaaacttggcgatgttattcttgatacgggagcatctcaccatatgactgggcagctttctctcttgactaacattgttactatcccttcgtgttctgtgggatttgcggacggtcgaaaaacgtttgctataagcatgggaacattcaagctttcagagactgtgtctttgtctaatgttctttatgtcccagcgttaaattgctcattaatatctgtttccaagctagtgaaacagatcaaatgtttagcattgttcactgatacaatttgtgttttacaggaccgattttcgaggactttgattggaaccggggaggaacgtgatggagtgtattatctaacggatgcggctacaacaacggtgcataaagtggacatcacaacagatcatgctttgtggcaccaacgtttaggacatccaagtttttctgttctttcatctttacctttgttttcgggatcctcttgttctgttagctctcgttcttgtgacgtatgttttagagcaaaacaaacaagagaagtatttccagatagtagcaataaatcaacagattgtttttctttaattcattgtgatgtttggggaccatatcgagtgccatcttcatgtggagcagtttattttttaacaatagtggatgatttttcaaggtcagtttggacatatctactattggcaaagtcagaagttcgtagtgttcttactaattttcttgcatacacggaaaaacagtttggaaaatctgttaaaatcattcgcagtgataatggtacagaattcatgtgtctttcatcctactttaaagaacaaggcattgttcaccagacttcgtgtgtaggaactccacaacaaaatggtagagtcgagcgcaagcataggcacattctgaatgtttcaagagcactcttgtttcaagcatcactaccaatcaagttttggggagaagcagtcatgacagcagcttatttaatcaatcgtacaccgtcttctattcacaatggtctctctccctatgagttgctgcatggatgtaagccggattatgatcaattaagagtcttcggctctgcttgctatgctcatcgtgttacacgggataaagataagtttggtgagagaagccgtttatgcatttttgttggctatccatttggacaaaaagggtggaaagtatacgacttgagtactaatgaattcatagtctctcgtgacgtggtgtttagagaaaatgtgtttccttatgcaacaaatgagggtgatacgatctacacaccaccggtcacttgtccgatcacttatgatgaagattggttgccatttacgactctagaagacagggggagcgatgaaaattatttgtctgatccaccggtttgtgtcactaatgtttctgagtcagatacggagcatgatactccacaaagtcttccgactccagttgatgacccactttctccgtctacaagtgtcactccaactcagacgccaactaactcttctagttcaacatcaccgtctacaaatgtctctccaccccagcaagacaccactccgattattgaaaacactcctccgcgacaaggaaaacgacaagttcaacaacctgctcgtctgaaagattacattctatacaatgcttcttgcactccaaacactcctcacgttctctctccttctacatctcagtcctcgtcatcgatccaaggtaacttacagtatcctttaacggattatatttccgatgagtgtttttccgcaggacataaggtgtttcttgctgcaatcactgcaaatgatgagcctaaacattttaaagaagatgttaaagttaaagtctggaatgatgcaatgtataaagaagttgacgcactcgaagttaacaagacatgggacattgtcgatctgccaactggaaaagtagctattggaagtcagtgggtttacaaaacaaagtttaatgctgacggaacggttgaacgttacaaagctcgccttgtagttcaaggcaacaatcaaattgaaggggaagactacacggaaacctttgcaccagtggtaaaaatgacaacggtccgtactcttcttcgtctagtagctgctaatcaatgggaagtataccaaatggatgttcataatgccttcctccatggcgatcttgaagaggaggtgtatatgaaacttcctcccgggtttcgacactctcatcctgacaaagtttgtcgccttcgtaagtcactatacggtttaaaacaagctcctaggtgttggtttaagaaattgtctgatgctcttaaaagattcgggttcatccaaggttatgaggattactctttcttttcttattcctgtaaagggattgaacttcgcgtcttggtatatgtcgatgatttaataatctgcggtaatgatgagtatatggttcagaaatttaaggagtatttgggacgttgcttttccatgaaagacttaggcaagctcaaatattttcttggcattgaagtaagtcgtgggcctgatggtattttcttgtctcaacgaaaatatgcccttgatataatttctgagagttgcactctaggagcgagaccggcatatactccgttcatgtattgtcccaatttatgcaagctcctagggaagctcatttggaggctgcgatgcgcatagttcgttacttgaagggttcaccgggtcagggcattttgctgagtgctaataaggatttgactctcgaggtttattgtgattcggattttcaatcttgtcccttgactcgacgttcacttagtgcgtatgtggttctgcttggtggctcgcctatttcttggaaaaccaagaaacaagacacggtttctcactcgtctgcggaagcagagtatagagcaatgtcggttgctctcaaagagatcaaatggcttaacaagttgttaaaagaattaggtatcacactcgctgcgcctactcgtttgttttgtgatagtaaggctgctatatctattgcagcaaaccccgtctttcacgagcgtacgaagcatattgaaagggattgtcactcagttcgcgatgcggttcgtgatggcattataacaacacatcatgttaggacctcggagcaactagctgatattttcactaaggctcttggtcgtaatcaattcatttatcttatgtccaagttgggtattcagaatcttcacactccaacctgagggggagtattggggatagagtagaatctcttgtgatatattttgtgacagagttatgtcctataatttagggattcgagtttattttatacgatgactctcttgtataaatatcacactttgtgaatcaataaactcaagttagtgcaatacctaattctacacaaataattttctctctctctgaaagttttagagagagaaaaaaatcttttgtgtgaactttaatttaaggttaatgatttttgaggcacaaaaaaactcatttctcaaaactcaaaagtattgcttcaggcaacatgatacgaaataacactatcttaaattagaaaaataatgccaagattaaactaaaagtacataaacaatgcaaatgataaactaaaaataagaacttaaacatttaataatccggtaggtcgcttgtggatccactaataatgatgcttaaataaaaatgtattaatcattcgatcttctatttatgtgttgtaataaaatttaatttttaataatatggttttattaggtatttttaaaaaaaaaacttagtggatagaatttgtaaactttataaataaaagaatatgtgaagaattaaaacaaaatattaaaatagaatattttaaagcaaaaaaagagcaaacctctgctcgatttttatggcactctatatttagatgaagaaatagagttaacaatttgagatagtctaagagttgggaaacgaagagatgttgtaatggcaaaaaccacacaactttcctgtaggaaaattcttgattttaaggtttttgggcaaaataattctattcaataaaaaaattgttttgatggaaaaacaatattttgtgactttggcggaaacccgaaattctgcgattttttattttgacgaaaaggatctgtaatttgtgatttctaaggaaaatattaatccaaaatcctggtgcaaattcgttgttttttaagaatataaaacattaatctatcgaaactcacatgatttgagttatgattgtatatgaggatattttaaacatttacaatttttggaagaatcatattcatatgaattgacaatttaaactcatcgctttttatttttggatgagtaacaaatgcatctagctaccatatctagatagatgtctttaattgtgttaaaacagacatcatttggtatcttcatcttggtgacgcagttctaacatcaccaaaatcttcctcttgactagataaaaacacatgatgatttagttttacttattccttctctctacactactctttcatcaagatgtgttgttattgcaactctcatcatatcgatacatgttgagagattgatcgcttattttctcctgaaaaacaaaagaaaagaggaaaaataaaaggtttagtaatgaagacatgtttcatataatcttgagtgaaaaagctttattttctgtcatgtatttactttgattgaagttgtagatgctagactatcaacttggctattattctggctgctttacgacgaaggacgcgtgatagacatgttttcttctgctaaattcatgagccttttcagcccaggcaacacaaccgttcccaagtcaggtctatctttccgtcttaactctgcgcattgtaaaccgatttttgctaatattaaagcctcttcaattggccaatcagtaacaagagggtcaagtatcttggcaaaatttccttcctcaattgctttctcaacttgatttgtcaaacccattggtgtctttgctgtaagtatttgcaagagcacaatcccaaatgagtatatgtctgatttggttccaagcataccagtttgctggtattctggatcaatgtaacacaatgttccagcagtggatgtcattctataatgcgttgcgatgtcatcaattgtgggagggacaagcctagccaacccaacatcagaaatcttgctgaccatgtgctggtcaagtaatatgttagctggtttcaagtcgcggtgcactagtggctctggctttagctggtgaaggaaattaaggctagtggcgatttcagctgcaatgcggaatcttagctgccaagaaagcactggagagtttcctcgtctaaggagacaatcgtctaagctaccattggacatgtattcgtagactaaacatccgtattccgcacaggctccaaggagcagaaccatattaggatgtcttatacatgtcaagacttccacttcttgctggaactgtgatcttccttgtgttgcatccggtctcacaacttttatcgccactggtgtgtaatctagagtacccttgtaaactgttccataactgccttctccaatcttatgactatctgagaattttgttgttccttgttcaatctcctcaattgtgtatttcctatacattctattactatgaggtaaagcatgcattgctttattttcatgctctacttctcgtagagccgccgtttcgatttgctttcttttttgagcttcggtttcagccattctatgagcggcttctaatgcttccatggctgctctactctttgccttctcattctctgctattgccattgctgcttctttggcaagtattgcttcttctagtttatgtttcctttcttctttccatttgtgtaactcaatagtctgacaaaaacatagattcatatcttaatatcataaaaacggatgattattttaagtatatatgtatatgtatgtatgtagttataccgtcttcttagctgcgattgcttctttgcatgcactattatacatgtccattgtatacttaagttctagttttagccttctcatctcagattctacatcatcctgtgagaatttatagagtaatcaagaaatattaattaaggcagaaaaaatttgattagtaaattatttttattaatttacctggctatacattgacaatgatgagagtctcccactttcttgggagcttgtggagaatgcagaataagaagaacacaaatctatggactgtttttcagatgagcttgaggatgtagcatagttggatcgattgtcttcaaaccaatccatgcttggcctatcactactcacaaaggataagtctgagtccgacactaaggcctggtatgtcccttgatcatattcttttctcaaatatggagacctattcatattattatcactcagttgcatgcaaaagaatataaaatatcacaagcatgttggtaaattatcaggaaaacatacttgatctcgatctcgtcttgtatactttgcactgattgaagccttctctgagctctaggactgaagttgttgttgttggcattacttgaccgagctggtaattgtggacgtattgtgcaaagtggaggaggtgaagaggtagctgatctaacggacgaaattttacctttagagattgcataaactgtacagaaattgggtgctccttttatcactgcgtttgtaacatctaccgcttttaaccgcctatcgcaacaccacatacacacacatttacttaatataagacatgtttttatattgacaaagaagagtaataacatgaagaaatcttcttactttaaaagagttatcttagatgcaccgagtactagaatatcgattgcattctcttgtacatactctatgattccttctgcagcatcaacgttctccaatactacctcttcacaatttatctgtcaacaatactctcaatctttaacatttttgaccaaaacacctcctttctaattactaattaacgaataaattgacctaatgatatgaagaaaaatgtgtgtggttaggtgatagtttcgataggcaatgttttaatgtaaaaatcgcgataatacttttaacaaattgatgaagttagacgcaaaactcacgtctttcctagtgcagaaacatcggaatggaagaaacagttccttaacgtcatctccagacttatttggttgagtccctacatcaacattatgatgtttaattcaaggtaaattgaaacgaagttgactagaatatgtaacaatgagctttaaggggataccattattagcaagggtttgcttgactttaacatgaataagagttagagtctctcctggtgtcaaaagattatcaacagcccatttcaatgcagcctgacttcctttgtctcgatcaatcgcaattgcaacgctttcgtctcttcgctcaccatctaccatcttcaccatttctaaaaactcttgccaaaaaaacaggattttaacaatttgtttataaatgcaaaattgtgggttacaaaggcgttgaaaacatatgccaatattagcaaataggcaagatgcaaggttttcaactctcttttcggttatgttttgttgccttccatcgtgtcttctcgagttttcttttaggaaatattgttatcttataactgaagtaatattttgcatgcatatctctatctgtatttggtggtaacttataattgtaataaaattatacacatctttagcatttatatgctttctattttttatctagttcttaaaccaacatgtatataataaaatttctataaatagtattcttatatgtaaccagttgaggttgtataaaatgtttaagcattagatagattaagaaaatttatcaatttgttggtcatagtattctgaacaacatagtataaaattcatattaagtaaaagcattatatattatgcatgcatgatttttattttcaaaatttaatgattaactagatattgacccgcggtacaccgtgggtggatatgttcattgaaaagttataggtattttcttataagaattattatttgtatatgaataatatattgttgatatataatttttatctatctaaagcttgggtaattcatgtttatattctcatatttgttgtatattagattaatgttaaaattcagtattgttttgtggtttgggtttgttagaggtaataaagatctaaaacttgtattatttagggattgatccacggtacaccgtgggttgatatttttgttagaaaattaaagatttttactttaattaatattatttatatataaataacatattcaagaggtacatcatagacctatacttttattaaataaaaattgaattttgttttgaagatgatctatagatacatgctattttttttttatgtatgatactatgatacacctcatgacgatttttataactattttatttttgaaaatttaagttatatttactttgataaaaaagtttgaatgtttaaaattctataattgtatttttgactgttaattttaggatttcgtatatagtatatcattttgtcatattgatccaaaccaatcccacaatataaccaacctcgtcccgtacaattaaacatcattttatcattttcttatgaaatttgaatatttataatattggaaactttcaaaaaagttttaatatcgatccaaactttacaattgtatattgattgttaaatctagcatttcacccgtagtatatcgtccaatattaatatttataatatttaaatttcttataaagttcaaatatttacaaaatttaaactttataaaattttcaaaatcattaatatttaaaatttttaataaattttaactcttaaaaaagtttaaaaaattttaatacttaacttttaataaagtttaaatatatataatattttaaaactttgaaagttgtagtgattttaaaataaagaaatggagtaatcgaataacacttttacttttggatgtttgatatattaaggttcctgctcattcgtattcggaatcggtttgaccttttttataatatggctcttaacaatttcctaattctttaagcaaagtgggaccttgtacttttatttattttcatcgattgagtatcatatgtctgttttacaaaattttaattacatcagatgcaaaaaaatttaatattttattaactatatgtattttatatataaagtaaatatatatatatatatatataaacaaatatagtgacaaaaaaaataaaaaatttatatttagtctcgatatagatgttttaggaaattattcttaatcggatagagtttaataaagaaagatttagttaagtttaaaaatttaggaaagagttaattcaagtatttaatgcaaattaatgatttgtaagtttttaaaaataaaatatttggttgagataaaatttgtaagaacctaaatgtaaatagtaaatagtatagggatttttggctaaatagtctaccaaatatgtatagatagattaaaacgataatccatagacatgaatgtgtttaccggtggggaaaatgatcatttaattcctaaactatgtgcaattaactcatttattcctgaactattgtgggaacaaattaaatcacaaacttatcattgacttgatgcttttggaccaaaatatattcaacgtttagtaactaaagaaggtgttaaatcccttcaattaaacgtaataaacctagactaaaccttaaaaattctcatatttttccccaaataagaaccttaggcgattcaactcaaaattaatcgagaggcatagagatcgaaatcaaattcattgatttcagagagaataccatgaatagacaaaggagaaagcttccaattcgaagagatggtgaagcccaaattcaacgtgagggaattgaagccaatcatgttgcacccgaaatagttggaggcgatggagttgcaaagcgtggagttgcagaagatggagatataggtgatggagttgtagaggagatagtaaatgaggagggagaaggatatgatctcatgattctagtgttgatgaagatgattgtccggttattgtcgaagataatagcgggtacagagaggcagaacaatgtttggctgaaaatttagaggaagaagaagatgaatttgttgatgttgaaatctgcaataacttagaagaccattttgggtttgatgcgtgttaagatgatgctgttaataaatctgatgaaagcggagatgatgtttgggacagcgagaagattccagatccattatcagatgatgatgacaaatatgaagctgagaggccattcactcatggagaccattccgatgaaccgctagccttgaataatacaatcaacaatgcagacgaattcaagtatgcactcctcaggtattctctaaagactgaatacgatatcaaaatgtttaagtcatcatcgaataggcttggggcaaagtgtacacaacacatcaaagaaaagtgtccttggatagtgtattgttcttttgagaagaggaaaaacaagcttttgataaggagattctataataagcatatttgtgtaagatccggttaaacaaagtttttgaaaagtggaactattgcacaactttgggaagaaaggcttcgattgaatcctaaaattaaatctcaggagatggtagttgaaattaagagggagtttaatatgattgtgactgtgcatcagtgtaggagagcaaaacaattgctaagaaataaaagaaaggctagtcatgaatcacattttgcttgcaatgattctataggttatatgtttgttttgatgcattgaaaacagcttggaagaagtcttgttggcctattattcgtttagatgatgcatttatgaaatgggatatcaaagggaaaatgttagttgcagttggtaaagatggggataacagaatatttccaattacttgggcagtggtagaggtggaggatattgataattagatgtgttttgtgcaactgttgaaaaaagacttgagtcttggagatggagctgacattacaatgatatttgataaacatcatgtaagatttttggttctcgtaagttaaatgcaagattttatgatttcttgtgttggatattgatattatttacttgtggtgacaagatttattaaatgcagttcgtgatgagcttccccaagctgaacacagaatgtgtgcaagacacattttggaaaattggaagaagacaaacaaggatattgaatttgagcgtctgttttggaaaatagcaaggtgttacacatcacaatcctttgcaatatagataaattttgatgactttaattttgactataaaaataatattataaatgacaaatttaattacaatttattatattcatatttcataaaaaaaattatattatttatttactatcttcaaaaaaataaacatttaagatagtacttatttagttattgaatgtagcagatttatagttggaatatgtaaactgcaatattttacatgcatgccatttcaatatgtgtaaaacattttgacagacgatgcatgacacatatctctctcacaaatttccaaagtccttttaaatttttccacaacttctatttatatatatttgattatttattctgaagaatacttttagaattttatttatcttcatatttatggataattttggtatatttaaaaaatgagaaatgaaaaaatatttaacaatgtggataaagatcttctagaggttctaggtttaacagaaaaaaaaacaaaatcgtggcagttagctcaaattgagttccatgttgataattaaggttttcttaaaccagataaaaaagtttgggttagaaagatctcacataataatatatttatttaggattttggtgctttgtggacggatcacagagagaaaacaataagttttcaggaacagtgtggttctatacatcatcaaatacagagttgccaactatatgacgcgaatctctgtagaagtctatctctactccatacctaagtcgaaggtctactctggacgataaagtgtatgatttgtcccgaaaactaagatttagcctttttacggacagttcaaacctggtgaatatggtgtctttcccaaccgaatggtcggcgtttcaacatatttggaggattttcaaagcgacaaagaagaattcataagcttctttttattattaatctctcacaatgcaaatgtaaaagttgataattcggtatgaaaagttcgaaccgtttcgtatcatttatgtaaacaatattcctcaaaattggatcttttgaactctaaataaaaagataattaaaaaaatgttcatctatgatgagctacatatattatattgtattagcaacaaacctcatgatacgttcaacgtcgaaaatacacattctaagtaatagaaaaataactattaatattcccatccatgttgaagaaaatataagaaaagctaagaaactcaaaaagaagaaataaaaacaccatagaaaccggaagtgtctaaaattccaccacaaatctctaagtgactttctcaaaaataaagacttcgtcaacacaaactttcttttgatagaccacaaaaatttcttatgttgtctattcttggtatgctttgatagagacctctcctcttcaacactcgctctctctctttctttcctttttttcctctatcatttcatccatctcagattatcttcgtttttcttcatctccagagactctccttccatctacccttagagggcgcgcctcccgtgcgccttcttaactggttatggaatccaaatgtctcatgttcgtttccattgtatctgtcttcttcatggttgttaatggcgtatcagagaccgaaactctcttgaaattcaagaattctcttgttattgggagagcaaatgctttggagagctggaatagaaggaatcctccatgcaaatggactggtgtcttgtgtgatagaggctttgtttgggggttacgactagagaatcttgagctctctggctctatcgacatcgaggcgttgatgggtttgaattctctaaggtctcttagtttcataaacaacaaatttaaaggtccatttccagagttcaagaaacttgttgctttgaaatcactttacttgtcaaacaatcaattcgacctagagatacctaaggatgcatttgatggcatggggtggttgaaaaaacttcatctggagcaaaataattttattggtgaaattccaacgtccttggtcaaaagtccaaagcttatagagcttagacttgacgggaaccggttcaccggacaaataccagaattcagacatcatccaaacatgttaaacctttcaaacaatgcattggcaggtcaaatcccaaatagtttcagtacaatggatccaaaattgtttgaaggtgcactaattttattcacttttgttataactctagaaaaaccacatatatataattttaatagaaaaacatgtttttctttggctgtagggaataaaggcttatgtggaaaacctttggatacaaagtgttcttctccttacaaccattcctcggaacccaagtcgagcaccaagaaaacatcatcaaagtttttgtacattgtagctgcagcagtagcagcactagctgcatcactcataattattggagtggtcatcttccttatccgaagacgaaagaagaaacaaccattattgtcagcagaaccaggaccatcaagtctacaaatgagagctggaatccaagaaagtgaaaggggacaaggtagctaccattcacaaaaccgtgctgctaaaaagatgattcataccacaaaattgtcatttttgagagatgacaaggggaaatttgagttgcaagatttattgaaagcatcagcagagattctaggaagtggatgttttggagcttcgtataagacattgctttcgaacggatcggtgatggtagtgaagaggtttaaacatatgaatagtgcaggaattgatgagttccaagaacacatgaaaaggttggggaggttaaaccatgagaatttgctcccaattgttgcttattactacaaaaaagaggaaaagctttttgtttccgattttgttgcaaatggaagcttggctgctcatctccatggtattatttgtttttctctctttaatttttcatttgcaaacactaatgctaattaaatcattctttgcttatgatatgttttttttttttctatgtataaatctaggtcataaatccctagggcaaccaagcttggattggccaacaagattcaatattgtgaaaggtgtaggaaggggacttttatacctccacaaaaacctacctagcctaatggctcctcatggtcatctaaaatcatctaatgttcttctaagtgagaaatttgagcctcttcttatggactatggtttaatcccaatgatcaacgaagaaagcgcgcaagagctcatggtggcttacaaatccccagagtacgtaaaacaaagccgtgtgaccaagaaaaccgatgtttgggggctaggtgtactcatcttggagattcttacgggaaagttacttgaaagtttctcacaagtggataaagaaagcgaggaggacctagcgagctgggtaaggtctagttttaaaggagagtggacacaagaattgtttgatcaagaaatggggaaaacaagcaattgtgaagcacatatactcaatctcatgagaattggattgagttgttgtgaagtagatgtggagaaaaggttagatataagagaggctgttgagaagatggaagatttgatgaaggagagagaacaaggagatgatgacttttactcaacatatgcgagtgaagctgatgggagatcgtcgaggggactatcaagtgagggaattaacttgtcatgaaaagtaaatcgacaagctatcaagtaaacttttcatgcaaaagttgtcttaaaaccgcaacttgcttggagctaattgatgtcgacacttcaatatacggaatccccctttataagtagaaaaagttggttttgcgttaacgtgtgatattattttgggaatttcatctgcaagaaaataatgtagaggacaagatctttcttactttttaacagaaagcagagacaactccaaaaaaaataccaaaaacaaaaataataatgtactcaaactttgtactatatatacagggacgtagactcacatggaagttcttttctagttatttctacatattctctttgtattgtcaagatggatgttacatattagttttgcttagttttatgtatataactagatattgacatgcggtacaccctggatggatatgtttattgaaaagtatatgaatcatatattttttgacataaattttttatctatgtaaaacttgggtaattgatgttttatgttctgacatttgttgtatattagtttattattaaaatttagtattttttgtttgtggtttgagtttttttagaggtaataaagatttaaaacttgtattatctagagattgacccgcggtgtatatttttgttaaaaaaattagagatttttttttagttaatattatttatatataaataacatattcaagaggtacatcataagtctatatttttattaaataatattttgaatttttgtatttaagatgatctatagatacgtgctattgcttttttttttatgtatgacagtatgatactatgatacaccatagaaaagtttttttataactaatgttttttgaaattttaagttatatttgttttgttagtatttttttttagtgtttaaaattgtataattgtattttgattattaattctaggatttcatacatagtataccattccgtattaatatcgatccaaacccgtcccaccatataactccatcacgtgattaaacatcattttgtcattttattatgaaattcgaatatttataatattggaaacttcaaaaaagttttaatatggatccaaacttcataattgttggaaaattgatttgggtagctcacaaatcatgttatttttggtgttaaaaaaaaggtgaatggtttgattatatatttgtgtaataatgtaaatttgtaccaatcgagacccgtatgcatgtacaagcttaatgtttgcatagtttatatttatatgagattcaatataaatagatcattttcaataagagcacctttctttaatttagatatttcaagtggaacccttttttcatgtacaagctcagcctctgatccgatctgcttcatcttcttttcttcttctaaattctctgcttcatcctctcatggctgctgctaagattctcaacgaacgatgttttagtgtgacaaacatcaaacatcacatcccgctcactctagatcttgaagacaacaattacgatgcctagagagagttgttccaaactcactgtatgacgtttgacgtctctggtaatatagagggcaaccttcttcccaccggtgaggacgacatggcgtggcaaaagcgagacggtctcgtcaaactctggatctacggaacccttgcgcagcccctgtttcgctccgtgttcaaaacttgcggctctgctcgtgacatctggcttcacgtggagaaccaatttcgaaacaataaggaagctcgtggagcttgacaacgagctacggaccatggagatcggagatatgatgattcgcgactattgtcagaaagtcaaatttgttgctgatttactcaccaatgtcgctattatactcctttaaaattccttaatcatttaaaaagattgaatcaataaccattaaatttgattattagaattcaaaactatcaaaacaatcatatcccaataattacagtgatttcaaattttgtaatcattcagttaccaaaaacaaccaaagtcataaacagggtgaatattcattagctctcaattgaggaatatactaaaatatatactcaaaagacttattcgtaagcatattcttttttatctaataggttataaccctagccgaactcttttcctataaatataggatgtctaacaccctcttcaagactcactaagatagcaaacatcatctatacctttcctactcatttaaaaaaatgactgcaaatctttccatcacgagccaagatgacagcagacatttctaaataggtggacaatccaagcagcatgtaatgagagggccgggtgatttgcttgattcaccgtgctaaaatcaatacaatcaaaggtatgcagttataaagtgtatgcacatgttttttgtattgcatatagctaaagtaataccatgtatatagttttctaataccatagaatttttcttaggtgaaaatcaatttcaaatgcttttgacatgtctttgttggcaatcaagcaaaactattctgctatccaagattttgtaactaagttagtgtattaagaagataaaatcattttgtgagaatttaataaatacgatattgatttaattttctcttattttctactttgccaaagaaggaatatcctgcgttttagttgataagggctaacatcatcagtctacatgttacaataacatgatcatcacgtgctcattgggttttagtttctaaaagaaaaaaaaaaagaataagagaaattaaagcagatacactaaaattaccttcttgctcatcccattaaagcaaagaacaagtgatggatggaaactattatgggacgaaaaatttcaaacataaaaaggatgagacgggtttccagttaccaaatggacatttctaaaagagcattatagaagactctgttacctttagtattctgctaaaaagatggtcaagatctcaggtacaagttctagatgataagcggccaacaaaaagacgagtgttcctatagctatcatcataccgaggcattttcaaactacaaagttaaaaagggacaaaaagaaacacaaattttgatcataacccgtaagaaactatacaacaagaaaataacacttctctaactcaagacataagaaaaggccccaaaggaaagtaaaacttcaatcaaacgccactcagctaattcagagacaaggaagcaattaatcggaaaaaccgaaggtccgaagctaaggaaaccatcaccggagatacatcaaaccaatttaaaatcatgaatcctagctcggaaggcactaaatttcaatctaaattatcaaattcaaaagatttttgatacctaagaaggtgagcactgcgaaatcggaagccctaattttgaaacaaaatggggaagaagataagacgacaacgattgtttttaaaataaaaatctgtacaaataaataaattaatttgaaaatattaaatgggtgtaggagtactaatcggctcaacaaaagtttattctccttgactaatgggccagtgacttaccaattttaacatctactatcttaataagaaaatgtgttggaaatggtccagaacctctaggacttatactttttgtagattactacatctattttttttttaagttgattatgaaattttaattattaaaaatatattcatatgtcaaatctattttggttataaagcaaatgaaaggtgataggattacttatattttgaataaaatggcatgagcttgcatatttgttagagagcttgaattatgggtcacttaagtaaattttaatttataaactgtagttttgtatagaaagtttaaactgtttaaaatttaatattctttcacaaatatacacatttctattataagtttataactattagacttctaaaactgttaaaattatttgttatcagcaaaatcaaactatttatataaataaaacattaataaatgatgcaaaaatcgttaaatctttaaataaccaaaatttctattcaaaaattaaaactaatcaaacaaaaataaaagtatgtactaaagtaattttaagaacaaaataaaaatttccaatgaaatgttactacattatggctctgattggtgatgacaaaaagaacaataggaatatgaatgaaaaagaacaaaaaggaacaaaaaaaaggaaaatagtcataagtaggaaccaagaggaacataagaattgaacaaaatgattatggtaaatggtaaccaaaaaggtgaactaatatttaacataagaattactaaaaaaatcatttattgaattttgtttattaatttcatttaaaattaaagttctgtatgaatttaaaataaattaaattataaatttctcttcaaaacatttatttattttatagtaaaaatttaaattatattacaaatttaaaataaatttcactttaaaacatttatttatactaatttaaaataaattcataacattcattaaattgaaagtttgataaaaaagtatatatatatatatatatcaatatatactaaagatatagaaaatattatatatagaaatataaatattatcataaagctattttaaattgatttaataaataaaacgaattttatttttttgctcctcttggttcctgtacaattttggggtggaacaattttgttctatcattcctttttttttgaaaaatgatgatgaaaaatgtaggacccacatgtctgaaaatggaacaaaaatacgttgtaaatggtaaaaaaactaaggaacaaagaagaacaccactttcctactcattcttttcctcaaaagtggttatcaatcggaacctatgatatatatgtttttatataattcactaacaaaaaaaacaatcttaactaaaactttttgcaaacactattatttttacattaccttccacacatcttatatttttaaatataatgataagtgacaagtttatgatatatatatatatatatatatatactataatttaattcactaacacaaaaaaacatatacaaactttaataaaaaaccatacgataatacttacaacccgcataatatgcggtacacaacattagctattgtgtcataaataacactatacatttttctatgtacattataatttatacactacaatatatatatcactaaaaattattctaatatgtttattagaatataaaatctccaagtacgtgcgggtcagaatctagtttgttatataaaaataaaaaaccaaaatgtaataaaaaaatttataataaactctcataaaaacgaattaaaaaacattactacgttaaaataatcttaaacttcaacagtcaaattataataatgtttataaatatatatgatgatattcttagaatcaaatctcgattttggtagatttcgattcggttggattctcaacatttctttcaaattatctatgattttttttctttctttctttttttaaacatatctgaactctagaacaagcgaccgtgagtcataaataaaaggaaagagatccaaaaatataaatgcaactacttgaaatcgactaaatatatcgaaatcacgtgacaaatcagcattttatttattctattaactttatagttggttccacatcctttcactctattcgatgtattgtacacatctggcacaaatctgcatctctgtcttcttcttcgatcctcgatttcatccacaatatacaatagccaaatttccgattttctcctcactgaatctctagaatccatcgttgattcaaactcattttccgatcaaacggcatatttttccctctcgagagagcgataatgtggaaactgaagatcgcggaaggaggtagtccatggcttagaaccaccaataatcacgtcggaagacagttttgggagttcgatccgaatctcggtactcctgaggatctcgccgccgtcgaagaagctaggaagtctttttcggataatcgattcgtgcagaaacatagcgccgatctgcttatgcgccttcaggtattatctctggcttctctttgtttccgttgactttagtgtggtcttgactggtgacgaatctcgcaagttttagtcagtgatacttaggactgtgttgcttcatcacattgaagttaatctaattcatcacttgacttgtaatgtgaaatcaattcaaggtgataggagcatgtgaacttagcttgtaactagatttgattgtatcttactccatggatatgtaggagagtctagtttacaatagatggaaaagtacacagagcatatacaacaacaaaaactagagttaatctaccttcgccattttctcaatggaagtgaaaaaacaatcccaatctagagaaactaacaaagccatatgattcttttactgatttatttacaacgggagagttgtgataccagttatgcatttggtctaaagctgagatctgaatatctgtgttaacttattgctaccattatttgaaggcttctctttactacctattgtactctcttgtgtttctatagtttgtaatcatttggctttcattatttttattagtctttgagtccatgactttctctttaattttatgatattccatcagggcctgatctatggcaattcttcgactgattgcaattctctgatgtccagcctttaattatcttcttaattttctgctgtcctatgatatatcccatgagggcttaatctatcacactcctttgacagattacagttatctgatattcaaccatttctaatccaatagttatcgctctctctctatctctgtttgtagttttcaagagaaaatttgattagcccagttttacctcaagtcaaaatcgaagacactgatgatgttacagaggagatggtggaaaccacgttaaagaggggtctagatttctattcaactatacaggcacacgacgggcactggccaggtgattatggtggtcctatgtttcttctcccaggactggtcagttcatatgtttcgtgcctaagctttcttttgcaaattttacggaaaacttgacaaaaactacttttgattacagataattacactctccataactggagcactgaatacagtattgtcggaacaacataaacaagaaatgcgccgttatctctataatcaccaggcaagaaatttctcgtatctttactataattctgtttccttgcaatgctgtacttggattttccatcgcaaaatagatgtttacacatctttctgtttcaaagattttcgtcttctactttctaattgttaaactaatttgcactattggtggcatgtggtttcagaatgaggacggaggttggggtttacatattgagggccctagcaccatgtttgggtctgtgttgaactatgttactctaaggttgcttggagaaggacctaacgatggagatggagatatggagaaaggacgagactggatactaaatcatggtggtgctaccaatattacatcttgggggaaaatgtggctatcggtactaaagttttgacctctatctgtcctttaaagttatcgtatgaaaatttctgttacttgactcatctttttgcttggatctgctaatactgtaaataaaggtacttggagcttttgaatggtccggaaataacccactgccacctgagatatggcttctcccatatttcctgccaatacatccaggtaaaatgacaatctcatgtgttcttgactttctcaacttatatactgtttaaatttattcttttccctgtctccaattgttgatctgactaaactattcattcaaatgaagtgcctcgtattatcaattcttggttcagccgctatttataaagaatggaaaaaccagagtgctgtaaccatgcccgtatctgttttgtctcctttatgcttccttaggttcaactatttatttgggatttaattatagttatattggtaatgcgctccataagcagtacattatttcagactttatgatatggaacaccctcgatcatggacaactcaagtgaagtaaatcttgaatttttttgtaaatctgcttggaatcgagcatgattcaagcttgttcaaagcacacttatcgaatgtattaactatgtgtggatttacaaagatggatatggttttcttttgctacaacttgctttttagttcttatgcatattgctatagtgcacagtaaagcatcagaataagattaattttctcttgctccaggaaggatgtggtgccattgtcgaatggtgtacttgccgatgtcgtatttgtatggaaaaaggtttgtgggtcccataacgtccactgttttatcactgagaaaggagcttttcacagtaccatatcatgaagtcaactggaatgaagcacgcaacctttgcgcaaaggttcgtggaatggatggtggattttgcaactatgctaacacataagctcatcctttgacgaagttacttcctttcttaaaagacctgagcatttgcagtttaaatgagatccttgtttggctgaataacacaattagattaaatgattcctactagaatatacagtactcaaaatataggtttttacacatatcgatgtgtattcagatgctcaggggtaactgttttgatgctgatagttgcttttttattgaaggaggatttatactacccacatccacttgtgcaagatattctttgggcatcacttcataagattgttgagcctgttctgatgcgatggcctggtgcaaatttgagagaaaaggctataagaaccgcaatagaacatattcattatgaagatgagaatactaggtacatctgcataggtcccgtgaacaaggtatgcaaacttccactacagcctctgtaccattgtcttaacgattgttattattctctttcgcaagttcagtatgaggatatgttcgactttgtgttttctttctgtttatgattcctctactattttttttgccagccaatcctcttctttaatcatctgtgttctgtgctgttataggtattaaatatgctttgctgttgggtagaagacccaaactcagaggctttcaagttgcacctaccaagaatccatgactttctctggttagctgaagatggaatgaagatgcaggtaccgcatatttgtatatatgattatgttatgtagattatatggaccacggttactgctgaaccagtacaaatattatgtctctggaatcattagctcaacagtatacaaatatacactaaaaaatttgatagtactcagaatggctttactacattaacttatatgaagttgggagttttacctagtatgtgtttgatagaatcataagaaagaaacgaacaaccttgataaagctcttccctgtttctttttcctccagccaaccaaagcccctactttactttctatccaattactagttataaacattgaacctgttgtccatactctaatgcagcagctattgacagggttataacggaagccagctatgggatacaggttttgctattcaagcgattttggcaactaacctcgtcgaagaatatgggcccgttttggaaaaagcacattcatttgtcaagaattcccaggtttgggataggcagttaatgaaaatcagcgtgttgctttggatgttcttttccctctcatgattgtttcttttcatggtataggtgttagaagactgccctggagatctgaattactggtatcgccacatttctaaaggggcttggcctttctcaactgcagatcacggttggcccatctctgactgcaccgcagaaggactgaaagtaataataatgcgacagagttacctttcaggatttcttttctggtggtaattagttttgtaattcctcttcaggctgctcttttgctatccaaagttcccaaggcgattgttggtgaaccaatagatgcaaaacggttatatgaagctgttaatgttatcatttctttacaggttagatttggtttctaatacagattggtgcttcgatcagtcatatgtcgtctttctgctctgttgaccttttgttttttaaatgcatattttgaaaaccaaaacagtttccttgtctaatcagctgaaaatttctgatgtcagaatgcagatggaggcctcgcaacatatgagctcaccaggtcatacccttggttagaggtattgtctgtgtgcctagataatatatactttctgtatctctgtgtccaacacatatttgccttagtcccctttgcttgaggttttaagtgaaaagtttactcatttctgttggcagctaatcaacccagcagaaacctttggcgatattgttattgattatccgtaaggcactagcatattccattgattgaatcatctggttaatcttattttatgttttgcaaatttctcttgatgtgcaagaatggttctgtagttacgtggaatgtacatcagctgctatccaagctttgatatcatttcgaaagctgtatcctggtcatcgaaagaaggaagtagatgagtgcattgagaaggcggttaagttcattgaatccattcaagcagcagatggctcatggtaagtctctattcattataaatctatttgcagaattacatattttcctatattttatctttgtatcttctagttggtttctttttggtaacctgtgatatttccctaggtatggatcatgggctgtttgcttcacgtatggtacgtggtttggagtgaaagggctggtagctgttggaaaaacattgaaaaactctccacatgttgctaaagcttgtgaatttctattgtcgaaacaacaaccttcgggcggctggggagaaagctatctttcatgtcaagacaaggttaataattactttgtatgttcactaaactcttacttactgctctacttgatgaatcgtttcttttttacttttatgaataggtctattcaaaccttgatggcaacagatctcacgtcgtgaatacagcatgggctatgctcgcactcattggtgctgggcaagtgagtaaattccttaagaaactttgtacttcagttcatcgtgctgcaaggcggggggattgctcattcttgtcctctctctctttccatttacaattttatctctttgtttgtgttcttattaggctgaggtagaccggaaaccactacaccgggctgcaagatacttgattaatgctcaaatggagaatggtgattttccacaacaggtaacaagttgcatcaaccacatcattgtttggattttctcttagttaacggttaagtgattatcttgactctctatatcaggaaataatgggagtcttcaataggaactgcatgataacatatgccgcgtatcgaaacatttttccgatatgggctttgggggagtaccgttgtcaggtattattgcaacaaggagaatgaattaagtgttcaaattagttatttctctagggaaggaactgtgtagcttccatgctttactctttccaaagttgtgttatccgtaatggatctgctctgatggttacgtgaaccaatctttgtgtaattgtttcaaactcaaatcttggttgcagattttgttgggttctcttgaataccccattttaggataatgtcttgttttgtgaaaacagacatttttcttgtatttgtttttttaattcatgtttcccgcttaggtcgtgtctccggtggtttcccactttgctcaaaatattggttttgactggttgcttttactaagcaatttttttcatctaaaataagttttcccttggattcctgggatgatgctcatttaattccccaagtatggtgtgggcaattttttatttctaaatagtcaatgtttacagaatatataatattagtcaaataaaacttaatatacttagataagtctctaaatatatattaaaggcggttagccggaatttttctgtttttttgttttatatgaataattttcgattttaaacggatacctagtttccgctttgccggagtttattaccatcttagtttggattgttttccatctaagtttggtttattttgttcatctttctaccaaagctaaatccaaattccgctatttataagattggtttctttcctttaaccgtagcttggctcttctcaaatgattagagtaatatcttcgctaaaattacttcgttatcatacgaagttgacctcatatgataggtcaaaaggcggagcttctatctttgagcttgagttgaagcaaaaaagatctgaaaattcttcaatcttacgagacggttccaatctaagagggcggcaatacaactgtagaaagatctatcaagtggttatttggagtaaaagctgatttcattgaagaaacttagatcaataaggaatatcagcttcggtggtggcggtgagctgaacggagattgtgacggaagacggtgaatattgcagatccaatctttgttgcttttcatccacacacgtgtcttacacctgtcaaaatatgggcttaattctgaaatatattttatgtattttaatatgtaaagtccaggttgttgggcttccagataaccacttgtaatgcccatgagctttgttttccatataaatagatttggtcgacaaaaaaaaaaagatcagtctctaaattttttcccaaattaaaacctaagaaccctaaaatctaaagttaatatgtttaatttttatttttgtaaagaaccgcaacttaatattgttcaatctctatttcttctcgaaacttaccacaaaacatcgcagctagcggccaaatccaccctctcttctcctctgtccaaatcctctttctattaccgtcttcacgatcactcgataccattaaaacatcacttcatggcggaaaaaaaactttgtcaagaaattgtgaatatttcttcgattttgagaaaaatttagtcttttgggttcttatgttttaatttggaatttttttttggtttatcaagttgtattcctctatagtttcacctattagaaaagtagagtaaaacaaagcaatttttccttctaaagtaatacatccataacgtaaataaaaaaaaaaagaaatttgcgtgtttgttttggtctttaatacaagactgttttattgttaaatccaagccaacaacatctaccaaaaacaatttaaacttcccgtaagttaacactatctatctcctataggctagaggaaactaacaagaattgagccggaaaaaaaggtaacatgaaatggagatgttagtatacctttttcattgttttgttttctcccatgcatgcttgagactttgaacagattattatcacttacaagaagacaagtcataagatataagtagacaagaccaaagaaaagaaaatggctgggaggtcgccggtaatcaaccaaggaccagatctagtggagtagacttcctgaaggagagaccacacctgaagtctttctgatctctctggctctccatacaaaaaggtagcataaaaagatttacccttagcagttatttttgtgtccataaagtgaatataggagctgataatttccacttgtaaacttgacctccagaaaagagctaaaccaccagcagcaggagaaaggggtgcaaccaaatgatttgagttattgtctagccactgaagcgtttgcaggacattttcagaggtattcttggtttccatgaggaatagaatgtcgggaaatatcgatttacgaattttttttaaccgctggactgtcatgggattccccaacccacaacagttccagcttactatccttaaggaagcggggctaatggattatgaaaatccactttatttttctgggctgcaggaattaagaaaatctttggatttgcaggtttcttcgattttggacaggcagccttagaggaggggttacctccttgtagagctgcaaaagatgaaggtagattagatccagttcctttctttggtgagttccttacaagatttctcttttggcttttggctccaattaactttgaggaggaatttgcaggattctttgaattggttttagccagtggtggtcgacctcttcctcttttcacctggactacatgagaactagtaggtagggaaggatcctccctaacagatacacgaggctcaggggaagcaggaagggcaagtccaatggggtcagcactggaaatggaagcagcggcggcttcaattatttggtcagttgtattactcatcaagtttctagcctcgccttgaataactctttgtttcctagctgcgctctcaatgggatcaacacacgtcaagtattaaatagtgacttcacgcagttcaccaaggacttgatctttggaaggtatgacaactggggggaagagacctcagaaagtctttgattccagttagagagaggagcaggcaggagaggtggagtttgagggtccggggagaggacatctctctcaagagggggtcttcttgttctggaagaatcagaggtttcctgggaaaatcttggtacatttgagtgtttttcttgccattagagattccccagattagcagaacccgcaccatgagggtggttagtgtgataaacttgagctttagagctaggccgtgctctataccctgaggataatagtgaaacacttctttgcggaaagacacttctagacctttctccagaggggaggttagttctatccaccgcagaataatgtttatgagaagaggatccgtggccctgagaggaagcattaggagagatccctctaccatggcttttggatgcaacgaagttgtctgcaggggtatagtaattcctagagacaccacctgagcctcgggaatgagtagaggtgggcggtttagatttttctgaagaagaaattaaacctgggcaatccttaatgtcatgagatagtcttagacaatggcggcagtgatttttcaggtttttataatcaagaagcactaaggcttcactaccatcagggaactctaccactatctcttttgttaggggttggagtccattgataagcactttgagtttgacagaagaagaagagatctccatatccaagatttcaccaagctcttcactaatggtttttaacatttcctcttgccagtaatgtttacggagaccttggagttcaatccaaaaaggcagcatagatggaaaggagtcacagaaaactgtcccatttttggagaatgaccatccattggtcataatggtaaggtctattatctagaaccttctacatatcctcttcaaaatcaaatttaaactggaaacacccttttcccagacctgagcccacaacctttcctttgaggttccatctgttggagaggaaaggaaagagagaccagagacgttgagccgctggattagtgagtcgacccatgagagtgagagcatttgctttaataagctctgaagtatctaggtctagagctcagattcgtttgcgagttggagaggagtagcctcttgctaaacttttgcctttaaggtgagcatggattcttgtactcatggttaggtttgggtaataaatgagaacatggtaatagttgggggaaacgaactttcaaggagcaataaattttcaggagcagccggaggaagttgcagataggtttaaacacagttcaacagggttaaaacagggttaccaggatagcagagggaggggatatacctgaaggagagcagatatatcagatggtagcaagaaggaagtttcagagggagaaaacatcaggtccacgctggagaagttcatcagaaacctcgcaaacgcaccggaaaaagctagcctggctagggaccgttgggtattgctaaaaataggagggaaaagtggttgagatccggttagtagcaagtaccatacttctaatagccgtcttgattacagtgcctactagaatgactctctaagggtgtaaaaagacatgaaagctggggttgaaattttttattacagttatgccatttagattttaattttgtttgttttcattatttatgtctgttttaattgaatataattatgagaattgaaaagaataaatatttaattatgtggatattgtagacctattacatctaaacataattacgaccacatataaaacctaattttgagagagccgattaagggcggcaaaaggagaagcgatttccgacgacgacttgagaggcggtatccggcgacgattgttgtttaaatccgacaacgagaggagaagcgagtacggaggaagacaggagagtcgagctgattaattaagggcgactttatgagccgaagctaggagcgatggactcttgaaaggaggttagttattaacaactaagttttggtaatattagtgttaaggaaccgaaatgcatttatgttgtcggcttttgtgtatatgaaagttgtcggaaaatgacggacataatgtcttcttattttaagttgatgaacacaatcttatgtatgtcataaaatgcgattgacgtattcttgaatatgttgtttgagaagcatttgggtgacgaaagagaattaagtgttatgttgtttataatttgaaattcgcgcagttgatttgtacagtagacttaaaaaatataagttgtatgatgatagaggttttgaactgatggtagacataatgcgtatgtaagtctgtctaaaaaaactaatgcatttgattataaagaagtttaggccgttaatgatatgtggaacttgaagaaacagagtgtctgaagttcaacaggcgtgtctgaagcaacacagagcagaacaaaggaacagaggaagcggaaaagaagcagttgcttttgccagcgtggcatgttgattggagtgaagaaaaggcgtatcactttagacaaaggagacgaagtcgtcagacagaggacgtgggcctagtgtcaagataatgatgaggagctagacttggaccttctagataaagtggagcatcctgccttttccgagaaactacataagagaagtttcggtctcttagtagaacttgttcttgtgggttttattggtgagtgaacaaagtgagcacacggttgttgttgtgtttgtgagctgggtagttttagtatctgacatgagcaaatcaggttgttgatgttgcgtaacactgtccaaagttatctgtgattgatcagtttgaaagttgttctaataaagtgtgtttattggagttgtgttctttgtcttgtcaaagtacttagagttcttttactacaattggtatcagagcgggtaaccaatctgagattagtatatctgaacaggttagatcctaattatggaaccaacggatgttagtactggtacaggcaaggttttactgctagatactaagcggtatggatactggaaagtttgtatgacacaaatcattagaggccaaggtaagatgcttggactgtagtagaggaaggatgggaacctccgtttgatctaacagaagatgggttcaaaatcactaaaccaaaggcgaattggactgcagaagagaagcttcaatcaaagtttaatgcaagggctatgaaagctatcttcaatggtgttgatgaagacgagtttaagcttattcaagggtgcaagtcagcgaaacaagcgtgggacacgttacaaaaatcccatgagggaacttcgagtgtaaagagaacaagactggatcacattgctactcagtttgagtatctcaagatggaaccagatgaaaaaatagtgaagttcagttcaaagataagtgctcttgcgaatgaggctgaggtcatgggaaagacctataaagatcaaaaattagttaagaagctgttacgttgtttgccaccgaagtttgctgcccacaaagcagttatgagggttgcagggaatactgataaaatatcatttgttgatcttgtgggaatgctcaagttagaagaaatgaaagctgatcaggacaaagtcaaaccgtcgaagaatattgcatttaatgcagatcaaggctctgagcagtttcaggagattaaggatggaatggcactgctagcaaggaattttgggaaagctctaaaacgtgtagaaataggtcagaatcgtgacagtacgccctgaagcaataaagatggagagagatcacgtggaagattctccagatctgagaatgatgacttaagaaagaagaaggaaattcaatgctatgagtgtggtggttttggtcacattaaacccgagtgtccaatcaccaagagaaaagaaatgaaatgtcttaaatgcaaaggtgtgggtcacactaagtttgaatgtcctaacaagagcaaacttaaagagaaatctttgataagctt

SEQ ID NO: 185 - DNA, 80891 bp, Arabidopsis thaliana
aagcttgttcaaagcacacttatcgaatgtattaactatgtgtggatttacaaagatggatatggttttcttttgctacaacttgctttttagttcttatgcatattgctatagtgcacagtaaagcatcagaataagattaattttctcttgctccaggaaggatgtggtgccattgtcgaatggtgtacttgccgatgtcgtatttgtatggaaaaaggtttgtgggtcccataacgtccactgttttatcactgagaaaggagcttttcacagtaccatatcatgaagtcaactggaatgaagcacgcaacctttgcgcaaaggttcgtggaatggatggtggattttgcaactatgctaacacataagctcatcctttgacgaagttacttcctttcttaaaagacctgagcatttgcagtttaaatgagatccttgtttggctgaataacacaattagattaaatgattcctactagaatatacagtactcaaaatataggtttttacacatatcgatgtgtattcagatgctcaggggtaactgttttgatgctgatagttgcttttttattgaaggaggatttatactacccacatccacttgtgcaagatattctttgggcatcacttcataagattgttgagcctgttctgatgcgatggcctggtgcaaatttgagagaaaaggctataagaaccgcaatagaacatattcattatgaagatgagaatactaggtacatctgcataggtcccgtgaacaaggtatgcaaacttccactacagcctctgtaccattgtcttaacgattgttattattctctttcgcaagttcagtatgaggatatgttcgactttgtgttttctttctgtttatgattcctctactattttttttgccagccaatcctcttctttaatcatctgtgttctgtgctgttataggtattaaatatgctttgctgttgggtagaagacccaaactcagaggctttcaagttgcacctaccaagaatccatgactttctctggttagctgaagatggaatgaagatgcaggtaccgcatatttgtatatatgattatgttatgtagattatatggaccacggttactgctgaaccagtacaaatattatgtctctggaatcattagctcaacagtatacaaatatacactaaaaaatttgatagtactcagaatggctttactacattaacttatatgaagttgggagttttacctagtatgtgtttgatagaatcataagaaagaaacgaacaaccttgataaagctcttccctgtttctttttcctccagccaaccaaagcccctactttactttctatccaattactagttataaacattgaacctgttgtccatactctaatgcagcagctattgacagggttataacggaagccagctatgggatacaggttttgctattcaagcgattttggcaactaacctcgtcgaagaatatgggcccgttttggaaaaagcacattcatttgtcaagaattcccaggtttgggataggcagttaatgaaaatcagcgtgttgctttggatgttcttttccctctcatgattgtttcttttcatggtataggtgttagaagactgccctggagatctgaattactggtatcgccacatttctaaaggggcttggcctttctcaactgcagatcacggttggcccatctctgactgcaccgcagaaggactgaaagtaataataatgcgacagagttacctttcaggatttcttttctggtggtaattagttttgtaattcctcttcaggctgctcttttgctatccaaagttcccaaggcgattgttggtgaaccaatagatgcaaaacggttatatgaagctgttaatgttatcatttctttacaggttagatttggtttctaatacagattggtgcttcgatcagtcatatgtcgtctttctgctctgttgaccttttgttttttaaatgcatattttgaaaaccaaaacagtttccttgtctaatcagctgaaaatttctgatgtcagaatgcagatggaggcctcgcaacatatgagctcaccaggtcatacccttggttagaggtattgtctgtgtgcctagataatatatactttctgtatctctgtgtccaacacatatttgccttagtcccctttgcttgaggttttaagtgaaaagtttactcatttctgttggcagctaatcaacccagcagaaacctttggcgatattgttattgattatccgtaaggcactagcatattccattgattgaatcatctggttaatcttattttatgttttgcaaatttctcttgatgtgcaagaatggttctgtagttacgtggaatgtacatcagctgctatccaagctttgatatcatttcgaaagctgtatcctggtcatcgaaagaaggaagtagatgagtgcattgagaaggcggttaagttcattgaatccattcaagcagcagatggctcatggtaagtctctattcattataaatctatttgcagaattacatattttcctatattttatctttgtatcttctagttggtttctttttggtaacctgtgatatttccctaggtatggatcatgggctgtttgcttcacgtatggtacgtggtttggagtgaaagggctggtagctgttggaaaaacattgaaaaactctccacatgttgctaaagcttgtgaatttctattgtcgaaacaacaaccttcgggcggctggggagaaagctatctttcatgtcaagacaaggttaataattactttgtatgttcactaaactcttacttactgctctacttgatgaatcgtttcttttttacttttatgaataggtctattcaaaccttgatggcaacagatctcacgtcgtgaatacagcatgggctatgctcgcactcattggtgctgggcaagtgagtaaattccttaagaaactttgtacttcagttcatcgtgctgcaaggcggggggattgctcattcttgtcctctctctctttccatttacaattttatctctttgtttgtgttcttattaggctgaggtagaccggaaaccactacaccgggctgcaagatacttgattaatgctcaaatggagaatggtgattttccacaacaggtaacaagttgcatcaaccacatcattgtttggattttctcttagttaacggttaagtgattatcttgactctctatatcaggaaataatgggagtcttcaataggaactgcatgataacatatgccgcgtatcgaaacatttttccgatatgggctttgggggagtaccgttgtcaggtattattgcaacaaggagaatgaattaagtgttcaaattagttatttctctagggaaggaactgtgtagcttccatgctttactctttccaaagttgtgttatccgtaatggatctgctctgatggttacgtgaaccaatctttgtgtaattgtttcaaactcaaatcttggttgcagattttgttgggttctcttgaataccccattttaggataatgtcttgttttgtgaaaacagacatttttcttgtatttgtttttttaattcatgtttcccgcttaggtcgtgtctccggtggtttcccactttgctcaaaatattggttttgactggttgcttttactaagcaatttttttcatctaaaataagttttcccttggattcctgggatgatgctcatttaattccccaagtatggtgtgggcaattttttatttctaaatagtcaatgtttacagaatatataatattagtcaaataaaacttaatatacttagataagtctctaaatatatattaaaggcggttagccggaatttttctgtttttttgttttatatgaataattttcgattttaaacggatacctagtttccgctttgccggagtttattaccatcttagtttggattgttttccatctaagtttggtttattttgttcatctttctaccaaagctaaatccaaattccgctatttataagattggtttctttcctttaaccgtagcttggctcttctcaaatgattagagtaatatcttcgctaaaattacttcgttatcatacgaagttgacctcatatgataggtcaaaaggcggagcttctatctttgagcttgagttgaagcaaaaaagatctgaaaattcttcaatcttacgagacggttccaatctaagagggcggcaatacaactgtagaaagatctatcaagtggttatttggagtaaaagctgatttcattgaagaaacttagatcaataaggaatatcagcttcggtggtggcggtgagctgaacggagattgtgacggaagacggtgaatattgcagatccaatctttgttgcttttcatccacacacgtgtcttacacctgtcaaaatatgggcttaattctgaaatatattttatgtattttaatatgtaaagtccaggttgttgggcttccagataaccacttgtaatgcccatgagctttgttttccatataaatagatttggtcgacaaaaaaaaaaagatcagtctctaaattttttcccaaattaaaacctaagaaccctaaaatctaaagttaatatgtttaatttttatttttgtaaagaaccgcaacttaatattgttcaatctctatttcttctcgaaacttaccacaaaacatcgcagctagcggccaaatccaccctctcttctcctctgtccaaatcctctttctattaccgtcttcacgatcactcgataccattaaaacatcacttcatggcggaaaaaaaactttgtcaagaaattgtgaatatttcttcgattttgagaaaaatttagtcttttgggttcttatgttttaatttggaatttttttttggtttatcaagttgtattcctctatagtttcacctattagaaaagtagagtaaaacaaagcaatttttccttctaaagtaatacatccataacgtaaataaaaaaaaaaagaaatttgcgtgtttgttttggtctttaatacaagactgttttattgttaaatccaagccaacaacatctaccaaaaacaatttaaacttcccgtaagttaacactatctatctcctataggctagaggaaactaacaagaattgagccggaaaaaaaggtaacatgaaatggagatgttagtatacctttttcattgttttgttttctcccatgcatgcttgagactttgaacagattattatcacttacaagaagacaagtcataagatataagtagacaagaccaaagaaaagaaaatggctgggaggtcgccggtaatcaaccaaggaccagatctagtggagtagacttcctgaaggagagaccacacctgaagtctttctgatctctctggctctccatacaaaaaggtagcataaaaagatttacccttagcagttatttttgtgtccataaagtgaatataggagctgataatttccacttgtaaacttgacctccagaaaagagctaaaccaccagcagcaggagaaaggggtgcaaccaaatgatttgagttattgtctagccactgaagcgtttgcaggacattttcagaggtattcttggtttccatgaggaatagaatgtcgggaaatatcgatttacgaattttttttaaccgctggactgtcatgggattccccaacccacaacagttccagcttactatccttaaggaagcggggctaatggattatgaaaatccactttatttttctgggctgcaggaattaagaaaatctttggatttgcaggtttcttcgattttggacaggcagccttagaggaggggttacctccttgtagagctgcaaaagatgaaggtagattagatccagttcctttctttggtgagttccttacaagatttctcttttggcttttggctccaattaactttgaggaggaatttgcaggattctttgaattggttttagccagtggtggtcgacctcttcctcttttcacctggactacatgagaactagtaggtagggaaggatcctccctaacagatacacgaggctcaggggaagcaggaagggcaagtccaatggggtcagcactggaaatggaagcagcggcggcttcaattatttggtcagttgtattactcatcaagtttctagcctcgccttgaataactctttgtttcctagctgcgctctcaatgggatcaacacacgtcaagtattaaatagtgacttcacgcagttcaccaaggacttgatctttggaaggtatgacaactggggggaagagacctcagaaagtctttgattccagttagagagaggagcaggcaggagaggtggagtttgagggtccggggagaggacatctctctcaagagggggtcttcttgttctggaagaatcagaggtttcctgggaaaatcttggtacatttgagtgtttttcttgccattagagattccccagattagcagaacccgcaccatgagggtggttagtgtgataaacttgagctttagagctaggccgtgctctataccctgaggataatagtgaaacacttctttgcggaaagacacttctagacctttctccagaggggaggttagttctatccaccgcagaataatgtttatgagaagaggatccgtggccctgagaggaagcattaggagagatccctctaccatggcttttggatgcaacgaagttgtctgcaggggtatagtaattcctagagacaccacctgagcctcgggaatgagtagaggtgggcggtttagatttttctgaagaagaaattaaacctgggcaatccttaatgtcatgagatagtcttagacaatggcggcagtgatttttcaggtttttataatcaagaagcactaaggcttcactaccatcagggaactctaccactatctcttttgttaggggttggagtccattgataagcactttgagtttgacagaagaagaagagatctccatatccaagatttcaccaagctcttcactaatggtttttaacatttcctcttgccagtaatgtttacggagaccttggagttcaatccaaaaaggcagcatagatggaaaggagtcacagaaaactgtcccatttttggagaatgaccatccattggtcataatggtaaggtctattatctagaaccttctacatatcctcttcaaaatcaaatttaaactggaaacacccttttcccagacctgagcccacaacctttcctttgaggttccatctgttggagaggaaaggaaagagagaccagagacgttgagccgctggattagtgagtcgacccatgagagtgagagcatttgctttaataagctctgaagtatctaggtctagagctcagattcgtttgcgagttggagaggagtagcctcttgctaaacttttgcctttaaggtgagcatggattcttgtactcatggttaggtttgggtaataaatgagaacatggtaatagttgggggaaacgaactttcaaggagcaataaattttcaggagcagccggaggaagttgcagataggtttaaacacagttcaacagggttaaaacagggttaccaggatagcagagggaggggatatacctgaaggagagcagatatatcagatggtagcaagaaggaagtttcagagggagaaaacatcaggtccacgctggagaagttcatcagaaacctcgcaaacgcaccggaaaaagctagcctggctagggaccgttgggtattgctaaaaataggagggaaaagtggttgagatccggttagtagcaagtaccatacttctaatagccgtcttgattacagtgcctactagaatgactctctaagggtgtaaaaagacatgaaagctggggttgaaattttttattacagttatgccatttagattttaattttgtttgttttcattatttatgtctgttttaattgaatataattatgagaattgaaaagaataaatatttaattatgtggatattgtagacctattacatctaaacataattacgaccacatataaaacctaattttgagagagccgattaagggcggcaaaaggagaagcgatttccgacgacgacttgagaggcggtatccggcgacgattgttgtttaaatccgacaacgagaggagaagcgagtacggaggaagacaggagagtcgagctgattaattaagggcgactttatgagccgaagctaggagcgatggactcttgaaaggaggttagttattaacaactaagttttggtaatattagtgttaaggaaccgaaatgcatttatgttgtcggcttttgtgtatatgaaagttgtcggaaaatgacggacataatgtcttcttattttaagttgatgaacacaatcttatgtatgtcataaaatgcgattgacgtattcttgaatatgttgtttgagaagcatttgggtgacgaaagagaattaagtgttatgttgtttataatttgaaattcgcgcagttgatttgtacagtagacttaaaaaatataagttgtatgatgatagaggttttgaactgatggtagacataatgcgtatgtaagtctgtctaaaaaaactaatgcatttgattataaagaagtttaggccgttaatgatatgtggaacttgaagaaacagagtgtctgaagttcaacaggcgtgtctgaagcaacacagagcagaacaaaggaacagaggaagcggaaaagaagcagttgcttttgccagcgtggcatgttgattggagtgaagaaaaggcgtatcactttagacaaaggagacgaagtcgtcagacagaggacgtgggcctagtgtcaagataatgatgaggagctagacttggaccttctagataaagtggagcatcctgccttttccgagaaactacataagagaagtttcggtctcttagtagaacttgttcttgtgggttttattggtgagtgaacaaagtgagcacacggttgttgttgtgtttgtgagctgggtagttttagtatctgacatgagcaaatcaggttgttgatgttgcgtaacactgtccaaagttatctgtgattgatcagtttgaaagttgttctaataaagtgtgtttattggagttgtgttctttgtcttgtcaaagtacttagagttcttttactacaattggtatcagagcgggtaaccaatctgagattagtatatctgaacaggttagatcctaattatggaaccaacggatgttagtactggtacaggcaaggttttactgctagatactaagcggtatggatactggaaagtttgtatgacacaaatcattagaggccaaggtaagatgcttggactgtagtagaggaaggatgggaacctccgtttgatctaacagaagatgggttcaaaatcactaaaccaaaggcgaattggactgcagaagagaagcttcaatcaaagtttaatgcaagggctatgaaagctatcttcaatggtgttgatgaagacgagtttaagcttattcaagggtgcaagtcagcgaaacaagcgtgggacacgttacaaaaatcccatgagggaacttcgagtgtaaagagaacaagactggatcacattgctactcagtttgagtatctcaagatggaaccagatgaaaaaatagtgaagttcagttcaaagataagtgctcttgcgaatgaggctgaggtcatgggaaagacctataaagatcaaaaattagttaagaagctgttacgttgtttgccaccgaagtttgctgcccacaaagcagttatgagggttgcagggaatactgataaaatatcatttgttgatcttgtgggaatgctcaagttagaagaaatgaaagctgatcaggacaaagtcaaaccgtcgaagaatattgcatttaatgcagatcaaggctctgagcagtttcaggagattaaggatggaatggcactgctagcaaggaattttgggaaagctctaaaacgtgtagaaataggtcagaatcgtgacagtacgccctgaagcaataaagatggagagagatcacgtggaagattctccagatctgagaatgatgacttaagaaagaagaaggaaattcaatgctatgagtgtggtggttttggtcacattaaacccgagtgtccaatcaccaagagaaaagaaatgaaatgtcttaaatgcaaaggtgtgggtcacactaagtttgaatgtcctaacaagagcaaacttaaagagaaatctttgataagcttcagtgattcagaatctgatgatgaaggtgaagagctgttaaacttcgtggcgtttatggcaagttctgactcaagcaagtttatgagtgacacggattctgattgtgatgaggaattgaatcccaaggataaatacagagtgctatatgatagctgggtgcaactaagtaaggacaagctgaagctggtaaaggaaaagctaactctagaagcaaaacttgctaatgtgagcacagaggataagcagaaactgagtggaatcactgttgatggaaattcacaggactactatcaaaagaaacttgactgtcttcagaaagagtgtcacagggaaagagatagaactaaacttctggaaagagagttgaatgacaaatacaagcagatcaggatgctcaacaaagggttagaaagtctagacaagatcttggcaatgggcagaactgattctcaacaaaggggtttgggttatcaaggttatacaggaaagatcaaaaaggaagaaggaagagtcatcaactttgtcagtggtggttcaacaagtgaaactgtggtgagacaaagctatattgaaccgaagaaacaagtaaagtcacatgttgaaataaaaagagaatctgttgtgagaacaaggatggtgggtgtgatttgctgcgatcattgtggtaagagatttcatatgagagaacagtgttacaaattcaaagagaaagtcagaacgctgtggaatttagcaaagtgcttcattgagccatcgagattctgcactgtgtggattaagaagaaagatctatatggtgatatggaagctgaaaggtacaatcacaagttagaaagaatgtatgaagaagaggaaatgcattacgccagttgctgcaatcaggtcaacaaagaaatgcaagacgaggcccgcaaaaaagatgattcattcggatcaacatgaaagcccaactacattgccagaatttatatattggaaagaggtttgcctacttgcttctatggtataatcctcttcccgcggagcctcctttcttctcggtccgcagagacaaaatgtaggactggtgccaacagttaatcacggaagaaaggactcactgcgccaagatcactaactaatctaatagaatagaaaaccctaatataatagaaaagaaaagaactgtcttttctttatacttatgtatactttccccggtttcgttgctactgcgggctttacgcaattgatcggatcatctagatatcccttcaacacaacataggtcgtcgaaaggatctcggagacctgccaaagcacgaaagccaaaatctttcagaaaatgaattcctattcgaagagtgcataaccgcatggataagctcacactaacccgccaatttgggatccaattcggaattttccttgagggatattggtaaggaattggaatgtaataatatcgattcataatggattcatatcgatacataagacaaggttctctatcgattcaacaagtgttgtacttatgggaaagcgatagagaaagagaaaaaaaaacaaagatttcacatagaaataaatggatggtgaatgcaaagacccaaaagaaaaatttataaatttatttttgtgattctgatgagctgttcactctttgaaagatatttgacttatttttaaacatttttgttattaatagatcaatccatctgagtcttatatctcacctccaagaatcgtgaaaaatggtatgttttttcttaagtctttggttaagagaaacagaaaaattgcgttaatggttgttgaaatagtagcttatatgttttgtataacaaatttggacaacgtttaagaaatacattttcgctggcgttttcattcaaatccaagccgttttgactatgtgagaaaggtgcttatggagattattgaaggttttgattttctttcgtgtgtttatatagtcaagtcacttgtgaataaaatgaatgtaccatcctcttttttggtcagaaaggtttttatttattaacatttttaggagcatgaaataaataaacatattagatttggcacaataatgtctcgccttaattgacgatgcatggataatgttatgtgtatacctttgtgtggatatgaagcgaagacagatgagagagatgtgattattatctaaatatatttttttttaaatatgcgaggatttgtaaaaagtgaagtattcaaatttgcatttttgtgaagagagattggctacaacctaaaaagtctttctacgactaacatttgaaaaactattccgaaattattatggtttatacatcatgactgatacacatgatgggaagatttaacatagagtaaaaaacgatgatattacaaagaaaattcaatcaattaggcttttttttagattagaacaactctcgtacaaacatatatgtcattaatgaaacatttttagaaaaaactattgaaaaagatttaagcttatacatgtttgaatgtctgctagagttcatgcttgttatcatggagccactttcccgtgacacacacaatcattccagatccaattttgaaacatatttaacatgtattcttgagaaaaaatatcgtatgacacattgtcgcctattaaaaagatgtcgtttttgaaaactcaaaaacaattatcttgtatggtgattgtgtgccctttgaattggtcatttttccagtttcagtagtcctaaatatgcaacgtagttgtgacttcaagtgttttagccactactcactaaactaaaacatctcgcttaggattctaatattgtgtgattgtgaaatcatatttactattattttttactcttacacattagaaattatatgatttttgttataaaaatagtgtcacaaaacagtcacactttgtgacaatgttgcgacgacgttgcaactctcgcaattttattcatatattcaccaatagaaaattttaaatatgttaagttttaaggtttctacaacgatttgaagtacatagatgttaaaaatcattataataccaaaaaatttgatttattttttatgttttaaacaataattctaagcttacgtaatgttatatgtgatgtgaactaatggttttttgaattttcataattttctttgcatttcatgtatttacttattaaattgattgatcttgtttagtattatgatttcattgattttaaccttatagatataaccttttggatcttaaactttaaaattcatatgaatagggttgtgactcataaaaattcatcataaaatattagcattttgcaactattctaaggaaaagttacaaacaagtcattacataccaacatatatttggctgagttgtgacgaacaactgagattgagacgattgtgctaccttttagcaacccttgcagtttttgttaagatattaaccaacataatattgttaatatgttaagtttcaaggcgttgcacaaaaaaaaaaagtttcaaggattctaaattgattttaactactatatctacaaaatcattacaatggcaaaaaatccctttaaagtttttaatgttttaaacaaaattcctaaacttacgtaacgattatatgtgatgatacttataatttctaaatttctaattattcttacatttcttttctttctcattaaactgatttatcttgtttagtatcgtaatttacatgactataacattatacatagattttatttagttagtaagctttaaattcatagaaatatagttgtgactcataaacattagtcacaaaagagtaacactttattattactttaaaaaaaaggaaaaatatcagaaaaatcgtcaactttcaaaaaagagacgaaaaactcgtcaactcacgagacgttgttttaatcacatacttttggttaacctctccaaaaaataccaaagttttgttgaccgagacaaataagttatcgcgttaagtctctgttagtacacgagaaacggggttaatacttcgttaacggtcaccgttaaacctaaacgacttcgtctctttaaaaacaaaacaagcctctgaaacccccaattcaattttagaatctcaaaccctaaattttccaaatctcttctttttcttttacattctcactctaacaatgagctcaagctctgtcacatcacgtgttgccagagagcgtggtgttgccggagagcgtggtgtgccgtcgaagtgtttgtgtggatcagaagtcacgatctttgtttcaaaaacccaagagaaccaaggacgtccattctttcgttgtgttaggaatagagatgtgaatacttggacaaccaaaagagatgtatgtagaggatagaaatgagtcgacatttttttgacaagctaacaatgtatctatgtgtttgtgcattagggtcatttgtttaagtgggtagaggatcccgtgtttgaagaagtcgaagatgctttaccaagactagccatcgtagcaaatgagattagcaaagttaaagcagaaacaaatgagatgcttaatcagatacaagagctgaaagaagaagccatagcgaggaaaaaggaactcgtcaagtgtaaagagtggttgtatgtgtgttttctgttgctttgtgtaatcacaattgtggttgcttatgttatgtttggtcaagggaaccaaaagaaactttcaattggttattgagtgtatgcaatcttatgtaacttttgtaatgttgtatggattataactaatcgtttgtaaggtaatttgaactcaaaagttatgaaaatgcaacattgaaacatgtcttaatacactctgaaacaaattagcaatgtcataataccaaacatgacaaaacaaaacatgatgagttatttggttctgaaacaagaaaaaaagaaaacaaaaaacaaaagctgcatcaacacattgtttagcgggaacattcaaaccatgatctccatcctccgaggttgtcatttccacttcctctatgtgttccacctctctcccatccgctctgtgcatttcctcttcctctctgtgttccaactctttgtgatctacctctgtttgatcgtcctctctgtgatggttggaaagcttgggatggcgctacatatggaggttgagaggttgctccctgagaagcttgagatggttctacttgtgatgttgctccaagagatgtttgagatggtgtaggtgctccttgggaaggttcagatggttctcgttgcaatggttgtccttgaccgaacaatatattcctcggctcctgcagccacaacataatctcattaatcaaccaccttatgcacatgataattttaaagatgacatgaaataaacctgatcttttcttgatcgacccctagatctttttggtggaggtgcaacaatctcattcttacacccttgtttgttgtgtccttcttgctggcaattagaacaggtcatgactcgatgtattcgtgataacatggtattggagctagaagctgtttcaaactgagacttcctccttgcatgattgtttggtctacctggattacctcttatgcaaggaggtggcagcactcccaaccggttcactctaggccatagaagcttgccctgtacaggcgtaatgccatcatagtatgtcagctgccacattctagttgtgtaccaatccacaacataatcttccaccttctcacgattctctataataaccgaggcagcgtgaatacatggaattctagtcatctgccactttatgcaaccgcaagtgtggctgttcattcgactgtgaagtccatatcgccacatttgatctgatacttgttatgtctggccatccatctttcacaaccttgtgcacgagcaatcatcttctttatcttagcatgagctcttttggtgaattgactcttcagtctctctactattacatacctcttttgattctgcaccatacattgccgcctaatatcttccaacatatcaagtagaggcttccttcttgcttgtctgatagttctgttgaaagattcactaagattattgaggttgtcattgtagcaacttcctatcctgacgtaagctcgtgaccatgtcctcggattggtcttcaacagagactcataagcgcttggattgtaattcttcagttcaaccatatggttagtgaattatccttcagtgtaactcctaacaatcttctagaatagtcgatgtaactccatgtcatgactattccttttccagttgtccataatgtgcctagcacattacttatgttcagcttgcgggataacagtatgaatagcttttaccaaaccctgaaaatgcatgatacaaataagaatgtcaaacaactaaaacatcaaaacaaacatccatataagtattaaaccaagagattctcaccaattgcttgtctgatatgacagctacattactcccatctcctaaccctaaagaagaagagagcatcttaagaaaccagtcccagttatcatcattctcaatttcaattacagcccatgctatgggaactatcctattatctccatctcttcctgtagtagctcgtagatgtccttttacatcccatttaaggaatgcactatctatccttattataggcctacatgtgttcttccaagagtctctttgcgatttaaaacagatagagagtcgcaaaaaccttggtaagctgtctatggttgttcctggagttgtctcaatctcaaatttggtctcaggatttgatcaaaaaatctctgcttggtagtcccaaatccgagcaaaatggtcatcgtgagtagctttcctttccatcaagatctttgtcttcgcctttgaacattaatcttctgtgactacaagattatactccctatgaatactaaccatctcttgcttagtaatttttggattcttcctcagcctctccctatacaaccatgcaattgtcccttacttcaccatcttgctgtaacctgacctcacacatacatgcttatcatcgtatatcatcagttgcatcttatgagtcttcttgtcatacatgctgtagcatctccatggacacttcacgtcagtagaagagcgctttgcaccaattctcagactttgtgatttatacagcttgatatcatatctagtcttcagagagtaccttaagacagctatcttgaattcttcaggaccattgaacgttttccccaatctcagaagcacttcaagatcttcggcttcaggagcagcaacaccttcttcttcaggacctagttcatcatcactgtcagccaaaggctctggaatcctctcatcgtcccatatctcttctccactgtcaacatcagtgtcccttgcatcgccatattctcttgcaccaataccaaaccctgcttcaaaatcatcgcaatgttcctcctctagacctccatccatatcgtcttcaccaacactgccacccacattgtcttcaccaacaatcccacccacattgtcatcaccaacattcccacccacattgtcttcaccacatgttccacccatattgtcttcatctatagtaacacccacattgtcttcatcaacgattccacggccattgtcttcaacataaggttcacagtaacgttcaggaacagcttcaatccccacttcacccacattgtcttcttcctcgcagtcttcatcgccgataacctcacaatcatctccactcacacaatcgcgatcttcttcttcttcttcgtcacgactcttccttttttttcttcttctctttttgttcatgttgtttctgttgaggaactgggttttcctcttgtagaatcgacaccgcctcaatcactgtttcttctggagttcgattagtcactgtttcttcacgggtttcatttatctccatttcttcttggttttgattagtctccgttaattctgggtttctattcgtcgcggtttcttctgggatctgatttgtcgcggtttcttttgggttttaatttgtctccagttcatcagagatctcaaaaacttctagtggtcgattcgaaatatttgctctgttagcttcgccaacaacagccattagcctccgcgaccgacgaggattccagtttcctccccgcgtcttcgccatcgggatcaattgctaagagattgagagaatttgagaattttctcttttagggttagggattggtttctaatcgatttgggaaattttagcagactgtgaatcaagcgacgacgtttctctcgtttttggctcgttttgtttttgacaaaacgatgtcgtttaggttcaacgatgcccgttaacgaagtattaaccccgtttctcgcgtactaacaaagacttaacgcgatgactaatttggctcggtcaacaaaactttggtattttttggagagatcaaccaaaagtatgtgattaaaacgacgtctcgtgagttggcaattttttcgtctcatttttgaaagttggtgatttttctgccatttttccccattaaaaaacaacactacacttacttacccttcttatttctcattggctgatcttaaatgacaaggaacacctaagggccatcttacaccgtcgacaaattctatccaacagactaaatcatctcaatatttcctttctctctcgctattgtttatgttattttctataatcaaatttttctcaccttctctctttctcaatgtatcctctccatcaagttcatgtgaaatcatgaaacccagaagactaaatcatttttcatttactcaatgattactagaaggttagttctctctttacacaataaatttgttatgtgttttgattatttctttggtagatcaaagaatttgttatttgtattttaggtttcattggtagatatgaagaatcaatttgttatagatgattgcaaatctgaagaactagcgccaccagtaccacatctgaaagtctccacaaattcaccaccaacacatgtcaacttgaatcgtccactggcgcacctcaaaacctcttgacaccatcacatcccagaccctctggccaccgccatggttttgttgccccacgcctatcgtcgctccatcgctccatcaatgtcgatatcaatatttaataaatcaattgatatatgttattgtatttatgtgtttgttatgatttttaaaaatagaaaattatatttatttcatatttccttatttgtttttattttttctatttgttagttaattttttcaaaaaaattttaatagtttttcactaagaagtcgctaatatacgattttagatactgtcacaatttagtctcaatatatgattactaatatgtatctctaaaccatcgctaatatacgaccacataagtcagtctcaaaaaccgtcacaaatatgagacgttattgcgaccattttatttagtgaccgtttttagggatcaatatggatagtctcaaagtagtcggaaaatatccatatgtgccagctgcttctttgtaagcatctaacaaataaccatatggagtatcaggcccacagcttttactcattttcttcacctttgcctcctcctttataagtgaagaaagctctgttttccctacaaaaataaattaaatcaactaatttatccttacataactcccaaaatcaactaatttaaagaccaaaaagatcttcttacatagatctcctaaaattaactcattttaacgaccaccaagattttcctacataaaacagtatttagtactcaaaagaaaaaaaaataaggttggcgaaacctactttttgtgagaagagtgattgctactggatgaataataacatttaatgtctcaatatccatgatttgaacattgatgttctcctttaacttcgaaatcatttccaatgttggtaagcctttgaacggaaccatcatctctcgggatcaaaattatgttggagaccgtgttgatgaaagaaggaagtcggtgagcaaggaatatggtgttttagctcaagagttttaggaatttgaaatagtgatattgttgttagcaaataattaaactatgaacatattgggtatttattacgtccatcattttacaaaagcaaacaaaaattatatatttacaactcaagtttatgtatcattttttatttattgtaacaatcatgatttaaaatataaaatttaattatgctgacatgtggagtttttttctaagtgtgctagcatggataattatcatgatgtgtcaatttaaggtagtagtttaggaagctgatgtgactagccttagaaacctcaaataatatatgttcaactcaactgtatttatcattgtttttattgtaacaattatgattttaaatataaaattttaattatgctgagatgtggagttttttctgggtatgctcacattgataattatgaagatatgtaaatttaagatagtagtttaggaaagagatgtggctagcattagaagcctcaaatagctccttttattagttggtaggtgataacgattttgatgtatatctcatttgtttgcttaataaaacgtagataaatgtttttgataactagttttataacaatcttaattattatttatttatttctctaattctagcaaattataatttttttcattcaagccgctaatagtaccattttttcgagatatgtgttagtagatttagctgatacaatcgttttttttacaaagaagacaaaatctcttaacaagagcagttgagtttacaacaaccatcaaaacatttcattgggaaccaacatctagactttatgtaggagcagctgcaactgttatgataaatgggtcaaacactctttaaattagaagattagtggtttgtgtcattcatcaacccatcatcgacacattggaggccatacaagaaaacctgcattttgggactacatttctgggacccttgtttggtcacatatattagtaacggttttgtaattattttgcggctaataaacgactacacacagagaattatcacaaatttacgacataatattgtagtcagtaaaccgcctaatatttctgactgttatgagactattcattgactttattggtgtagttgcaaaataatcataaactgagacgaattagatactctttttgtagttccaatctttagtctcaacgtagtcccaaatttgcaacgtagttgtgactttaagtattttaaccatataaagttttactcattaaactaagagatctcctttaggattctaattttgtgaaatcatatgtacaatttttttttttaactcttacacattaaaattcatatggtcagtgtaataaaatagcgtcacaaaacagtgacattttgtgactatgttgcaactacgttgcaactctcgcgattttatttatatattcaccaatagaaaattatgaatatgttaagttctaaggtttctacaacgataagaagtgcaaagatgttaaaaatcattataataccaaaaaaacttgattttttaatgttttaaacaaaaattctaaactcacataaatgttatatgtgatgtgaactaatggttttttaaatttttttaattttctttgcatttcatgtatttatttattagacagattgttcttgtttagtattatgatttcaattatcttaaccttatagatagaactttttttttaagtgatattttgatggtgaagcttactagagaagatgaattattattgttttgatatacaatttcaaatgaaaatgtaacacttttttccaagaaaaaggacaacatgcatcatcgagttcttttatggtttgggggaaaatgaaagtgatgagctatgtttctcatctgtccatttttggttatctttttgcattattgtttttatttgtttcctcatattcattaggataagaaaaatgggtaaaaaaataacattatcttttttagaaacatgaaaagacccataactctttatgggtttttaaaccttcacattttaataaaatgtaaaatagcatataatattaataaaatcaatttaaaataaaagaatccattatacttaaatttaaataaataaatagtttggtttataattctttttcctaaattctattttacaattgttttttttttctaattgaagttctttagtttttgtgttaacaaatttttttttttttgtgcacaaacttaattatattgctcaaatgatgttctgtccatacaaacaaagacatagttttgtgagagtatcaaccacaacattagatgaccgaagaataaatcggcacataaagctagcaaaagagttgatgcttaatagaatgtcttccaaaatactgtgaaattccaaaagaactgaacgagagtttatagctccgattagttgtggacaatcagactcaagcagaaagtgatccactcctaagctggctgcatccagaattgcaactctataggctaaactttcagccatgaaaggtgatgaaacgttctcgaaaatctcagaacacgttgaggtccctcctgaccccggttccttaaaactctagccaagtaccgccaagtcccgccactttgatgtcctctcgccaagccgcatccgttctacacaatacaccttgccataaattatataaaattatataattttttttttcaaatttagttgaggtatagtaaaacgttttcgttacggttatatccagtctatgcccaaaatttattgtttggaaaatcggtttcatatttatgataccatatgcagtctatgcctaaaatttattccagacggagtttatgtatgattccatttttcgataaaaattaagtattttgtgttatatatgattttttattaattttatgtactaattgaaaataacagttaataataatttattttgttgagttatagaaattcatcatcataaaaccagattagtttttctaatagtaaaagcgtcatataaatttttatatcaaactgaatatgaaatttatgtttaaaaagttatttggtttgattacacaagtttagaaaaaactatgctaataattttgaccaatttgaaattcaaaacttgaaaagttagaaccaattcgaacaaaaaaataaacataatgggtaatcaatgaatttctgtagtttatgtaccagtttctagtgggaacgacactgatttcttttaatagagtaagaaaaaaaattagaaagaaaaataggaaactagaatttgcaaaaataaattacaaactaagtttttatttatttatttatttgattcattaatattaggggttattttaccacttttaaaaaactgagggtttaaaaatccacaaaaaaaagttgagaattttttcatgattgtagataatgtgaggtttttttttatccatttttccattaggatgagttgtttgttattaaataagaggatgatttgtatcaaacaagaagatataaagttgatacttgaacaagagtgtgattagttttgctaaattaagcacatatgcatatgacaagttgtgtgggtgagagactcatcataaaaccaaaaatgaatgtgagagattcatcaagacacaacataagtttcttaaagtacttaattttacgattctttcttttgttttgttcaactactatcctttatatggcacacgtttatctatactctcttaaaaaggaacgcatgagatgatcacaacttatacgagaaattcaaataaaataaaaagattgtatttatatcttgtatttggaaactttagattgaaatgaaaatgtaatgatttctttcaagaagaaagaccgcatgcaccatccgatgtttttcaaggtaagggggaaaatgagagtgataatgagctttgattctcataagaactatttttggtgttctttctttcattattgtttttagtttctttatatgaagtttcaaatgaaaaatgtaacacttagattccttctaaataaacgcacatctctcattttctctaactcacaatatttctcactagttcttcaaaagttacataaattattttgcttaagctaagaaaataagtaaattaagtatgatatatatacatataaatatatatatatatatatatgtatatatgtcttatttactgattcaaaaaccttaagtaattgaattctttatttgtttgttttcttagcttcagtgtgtttgataatggagataagaaaaataatgtatgtttgataattgtgtgtttttatgtttgtagacatgcatgttttttgtgaaaactgtgggaagtcaaactgtgacaatcgatgtcaaaggtaacatgacccaaaatcgggaaattgaagtctcttcgagaagcgaaagaggggattttggctaacaaatagaggatctacttcaaagggaagatgttggcggacggtggagctaccaactaagatttaaaattttatagtttaaggaattgtgttggtcttttaactttttgttcgtccaatggtaggtctttaagcgggtttcttaaaaaacaaaaaaactattattaaattaaaaattacacatattttctttcataaaatttaataattaatctaaatttttaaattttaaacatacatgatataaatattgaaaatcggaataacgatagttgttagcttgatttccgccaaatttgtgccgtaaaatttaactcttaaattaattatgaaaaagtaatagtgaaattattaagaaatgatttcttaaagtttgagtttttcatttaaaaattttaaataattctcatttctaaaatcattagtttaactattttaattaacagttaatatttaaaactaatttaatttttaaactaatcttgaagaaaaaaataaaatccaaacatgatacacatattccttgcctaaaaattagatgattattatgaaaaaactaaataaatatgcaaattaaatatatctaagctattcgagatttatgctaagaaaacaagtaatttgaaagactgttttgtatgactgttttgtatttttttttttattctgctagatcgttcaatatgaaagaagaagaatctcaaggtaaatttctcgacttcgtaaattctatccttcatagtctccctttttgtacatcatatttctttagaacaaacgtttaataccttctaactgccagaatggaggccacggtagaagttacacaaaaacatattcacactctcagtttatgggattacaaactttcactactataaactctataaatactcaaacagacattgtttataccggattatatgtgtttcagacagcattagtaaatgtttaccaaggtgaaaggaacataaaaacgatacagaaccaccatcatgtacaacctacacagaaattacaaaatgaaaacatcagatacaactcaagttgacaatatatatatacacaacattgaatagttactcacctgaataatcactgaggtggtggtatttggaacaactctcaaaacacaaatactctgtagcgtccttttcagtatcgtttcatactctttttcaacttttcctatcaatattcaaagcaaaagaaattcacatctaaaaaccaagaatcacctgtactacatactcaagcgacaaaacaagcctctttctgaaaaactaaacgcatttacgattaccaatctatccggtttaaggcttccatatgacttcaaacaagccttctcagcattttcgttcttcttcgttcttgctttaggtccgtattgcgcagatagaacttttgtatcctctgaaaatataaacgagagagttccatgtatcccattcaaaaaggataaaaacaactttgtacccataatagatattgagaaagctgataaagtaccttctgaccaactaggagagccatgaggacgatgaaggatattacgcgaataagcaagaggtttcagctgacaagtaagtctttcacgagttatatttcaagtaaaaaaaaaagatataatcttaaaaattgtaactacataagatagttttagttttattaattaactacataataacgaataaaaaataaacataaattagcaaaaacaatcaataattgtttttcacaattttcaaaacaaactcacgcttcacaattttcaaaacaaacccacgctacacgtgggtatttatctagtataatataaaagacatgaaaaaagaatcacatttcaaagactgtttgtactcgaaaaatcgaaattctaaacttgcagtgatctgaattccaaaggaaccgaggtcaaacttggaagatggacacattgagaaaacccaagagagacagaatctatttgaatcttcttgcagaagtctcccctcgcaataaagatgcaacccactccagtttgattgtcgtcacagcacaggataagggtcatgtcatggatgaagtaactaatatcagaaagctgatggaatagcgagggaaaatcaggtattgacagtgtcatcaagtttaaccacaccacattattactagagttaatcatgtcatttgttacccaaatctctgtattacttgatatacgagattgctttaacaatgcaaactgatcgcccttaaatacagtgaggacaagtttatctcgtaagccagaaacatgcttcccacaaggaaggagacaaaagtgcatggatatttctgtggagaaatcaaagcttccgagaaaatgctcacgagtatcttcattgtaagcagtccaatacaaatttccattcaaggacacatattcacctcgacctgccagcattggccattccggggaatcaatgaacttaaacgcttgagacgcacattcaaagatcgcaaatctgtggccgattttcagtgtagtgtcatagaaacgactaaaatacccaaagatcttgtaatccttttcgggtttacaagcatcgtatcctacaccgcaaaaacggaaatctctgtcctccttatactcgatccacccaacctgtcttaaccatggattccaaatggtaaccccttggttccaaaagtcacgaaacaataatccatcgcaagccgtgatcctggtaaatgcccacttctcagccttaaaatgaaattgacaggctagctcacgcacctctatcttcggatcaaagtcgtccaggccgatggttcctatcgaataaatcttggattcgggcaggatgataaattggggacgtgcacaacccaagcttttcttgatgaaccatttgtcgttgagaagatcgttcagtgtttacatacggatcttacccgaacaagggatccaggtggaagccgacacagtatctcttcctccaactcccacggaagcttccccgacgccattacctttctccgacttcggtggctttagaggagaatctatatatataccaccgcgtgtacgactcaaataaataagaaaaggaatatttttatctgttacgaaaatgaaataacacccttttttggggataatattaaataattcttaaaagtaaatgtcaaataattcttaataattatttaggaaagagatttatcttccaataataaaattactgaataattatttctcaaggataagaagttaaaaacatagatttgaggaataaataaaaaaacaattattctttaaattgtttataaaaaagaaagaaatatatctttcaataagaactgcatatttttgtaagaaataagaaaaaaaattcatttcttaagagttaagaacaagaagacaatatttggagaaatattctgtttatatattctgtttttaattgttaaccttgtaacctgtttacgacaaaaatagagaagatctattggttttaatcagcagaatctagcaagaaactagattgattaccattatacgagattacaagaattgatttcgatgcaaaacttaatttgtaaatttgtaattcagctaaaggtagttggtcggtaggtttgacacagaacatataacctaatttttatatgactatggttttgcctatgtgatctctacagcttcattgatcaacttgaaaactagttctaaactttttcacaaaataccaacactgagactaatcaatcacatcaaatctagagcagcataagtattgaatattggtttaatttaaacaaatttctctacatatacaagttaaatgtctgaaaataaacttaatttaaacttttttaaaacaaataaatggttttttaattaatcaatataaaaaaatcgcctttaaattcccttggaaacataaatattgcgcatcggtttaattttttaaaaattaccaaaagaggaaagctgaaaaccaaaaccctaaaataatattaagagccacgttatcctaatagatcaaatgataacataacattgagagccacctgctgccgttttcttcggcgactaacgatgacgatgccgaatcttccaaatgagttggtagaggagattctcagcttttttccagccacatatctgaaacgtttgagctacttgcaaaccatggaaccgtttgatccacaacgacaagagattcgcaagaaagcactacgataacgccgcaaaggagtttctggttttcatgttgaggaagaacttcaggatttgtctgataggcgtcaatctccatggacctagctgatccatctgcagaggtgaaaggtgagcttaccctaccagatccgtattttaagaactctgctgatgaattcgatatagatagagtctttcactgtgacggcctattgttatgcacttcccaactcgaacgtagaatggttgtttggaacccgttaactggtgaaaccaagtggatccaaacccacgaagaagacaagaacatatcctgcaaaaagagctacaaaatcatggggttttatcgtagtggtagcaaagtttgggaatacgattttgaactctgattcatggagggttcttaatggtatccttccaaaatggtacttggatgaatcttgtaagtgcgtgtctttgaagcgaaatacttacatgcttgctagagctgtaacagaaatgggctttcacacctatccttgcacagttacgatttttcaacagagaaatttgcacctgtgtctcttccttttccctctcacgcccgtagttcgaatggtgctaatcgtctttccgttgttagaggagagacgagataagagatccaaggctgagatatgggtgacaaataagattgatgacaccaccgaaggagcagtttcttggaccaaggtcttagtattggatttgagcagggatcttcaagccttgtttacttcaaatttcttggtagacgaggagaagaaagtcttcatttgttgtgtgagttggaaggaagacgaagacgagaacaagtccaagaaagtatacattgttggggaagacaatagagtcaaagaaattgattctggagaagatgcaaccagtggatgtgagccaactattcttagtttgtatgttccaagtttggtctacatgtaatctctctctcttttgtgtgagtctgtgtgtttttaaaatttatcttgctttgaactgatatttcattaagatgttgtattgtcagatgtttcaaatgctcagtattgttccttgccttaaacacagcttttaaaagtttatgatcaaacctcttcttgtagagaagattttctaaagaagagaacagaattatgtttcaaattttcaagcttttctaagtcgtgatttattaaacatgaaccaagcttttctactggtattttctctgagttatcttttcccccaagttacaagttgtacaactagaaatcatcactcattcacttttaaagttcttcggttctaccactaaagctaatcatgttatcttacaaatacaccacttaaagttaaggaactaaatctattgataagagatccattaattaatggaagattaattcttgatgatatcttaattttaggacaaggaggattctaaggccaaaacttatcggttttgttgtgttgctggcagataaagtgagtgactcaaaaaaacttatccaaatcctttggtattgattatcggtttatccggtttttaaactaaatgcacataaccagttatcttgaaatgaaagatggaaagccctagactatattgagagccacttgccgattttcttcagtgatcaaaaatgacgttaccggagcttccaaaggatttagtagaagagatactcagttttgttccggccacatctctgaagcgattacgatccacttgcaaaggatggaatcgtttattcaaagatgacaagagattcacaagaatacacactgaaaaagccgcaaagcagtttcaacctctcacgttgacgaagaactacaggatttgtcctataaacgtcaatctccatggaactactccatctctagaggttaaaaatgaggtcagcttactcgatcctcactctaagaattcagcagctcagttcaatatagatcgagtctttcactgtgatggcttgttgttatgcacctcccaaaaagattcaagattcgtcgtttggaaccctttaactggtgtaaccaagtggatcgaactcggcgatcgttacaacgaaggtatggcttttattcttggatatgacaacaagtcctgtaataagagctacaaagccatgagctttaattatttagacaaggattctgaaatctacgagtttagctctgactcatggagggttattgatgatattatcaagccaccccactacatggactactttagagagtgtttctctttgaagggaaacacttactggttgggtatagatagaagacgaaggccaccggaccttcgcataaccttgatcaaatttgattttggaacagagaaatttggttatgtttctctgcctcccccctgtcaagtgcatggttttgaggcttctaatctttccgttgtcggagacgagaagctttcggtgttagtacaggccggttctacatccaagactgaggtatgggtgacaagtaagattggtgaggccaatgtggtgtcgtggagcaaggtgttatcattgtatccgaagcctgacgttggtttttggcatggcctaagtttcttgctagacgaggagaagaaagtcttcttgtgttgtaagagtaagggatggatggaggaagaagacgaggacaatgtttacattgttggggaggataataaattcatactactgaattttggagttgagacaattggaggagaatcgccaattattactacttatgttccaagtttggttcagatcgagctagctggaagcaaaaggaaaacagattactaaacaagctctacatttagtgtgttataatccttgctttaaacacagttttatttttattgatcaaaccatgtctagtaatgttttaagaagagaaaatttatgttccgaaactaaagctttttctaattcatgttggtcggtaattgagttttcagttaaaggttgtaagtttgtgttgtttcactcaagaggcacaagtagaaagagacacaagtatgaagtgacacaactaattgagttgttgtgtctatttgttttctatataaacaccttgtatcgtcatgtaaatactaacaagtttcagtttcaataaaacaaagttttgttcttgtcttcttcacaagagaagagatatgtctctcttactctgtttttcttctttctctcaataatccaacaattcaatgacaaaagtgattcttaaaacatatactaacaaagctttctcatattgtctcttcttttctataccaaactcactcccttacaaagttgtacagctagataacatccaaccacccaaagttgtggtcaaaattataggatttgtttactgaacgtaaatctcaaagaaacaccatccatagagattaggggtgaacttaagcgagtcagtatatatatctcaagtctttcactgtgatatacatcaacaaaggagacactataatggtggtttggaacccgtttatgggtcaaaccaggtggatccaacatatagatcttgacaatacacgctacaactatgatcatgatctctctctagggttggaacttggaaatgctagtcacagcagcgtgtctttataacacgaactgaatccttgctctattttgatttttcaactgagaaatcccaccttaatttgcctcttccctatcaatgtgataattatgatgccaaggttctccccgttgttggagaagagaagctttctgtgttataaaagcggtgtagaaagggttccaagactgagatttgggtgtcaaataagtttcatgacaccaccaaagctgtttcttggaccaatgtcttagcattgaaattggacagagagcttaagtttcttgctcgacgaggagaagaaagtcgtccaaatttgtcagagatggttcgacaatggaagcttcaataacatgttatatgttgttgggaagagtaaacaagacttgataatcgtacctgtgatagcggttggtattggccagctattctgaattatgttccaagtaatcaaactagctggaggcaaaaggaaaagatgtcactgaataggagctctacatgtaaatttgttttttgttggaatgtttctgagctttaatgctgacattttatcaccttgatatgtattttgacatgtttctgagcttcaatgctttccctactgtcatatacatcaaagcaatcccaatccgtattaagtattgactctggagaaatcaaaggacgtctacgtttaccctctactagaaagttgtatttaggagttgatttggcttagtggatgtatgatttggcaaaataatggctgctgaaaaagtgtaaagcttatctttgtttgaaatcaatccatggtaaaactagtgttgttttctctatgttgaggattttctagagagtgtattaatcttgttggattgatcgcttaagagctgagtgcttaaaactttcttagaatcttattctgcattcgatacgatcacattatttgttggtagggtgtgatcttaattgtgcgacaaggaagattcgaattaaggcagcctaaaaaaggagaggatcttaattgcgtgacaatgaagattcaaaataatatgaaagtttccagaataagcaaataaagttagagctttatccataacaatgacaaaatcgtcctatccataccaatgattcttatttttataaataaaaatatatgttataaatattcaacctttaaaatatttgagctaatcattggtatatttgtattcacaaaaacaaatacaaatatatttctagacacaacatttaaatatttgtgttaatccattgaatattttcaaaataaataatattgactacattgaaaaaaatatttaaaatcaaaattagagtacaatggtaacgtctactcgatttcacgaatctcagtagataatatacatgaaaatgaaagatgaccacattaacatttttttttaatgtgagaaactgagaataatacaaaataaatattagtaaaatactctcattctcattaattcagataattgtgggtttatatacaattgaccaggcttaaaccaaagcctctaaatcaatcctatacaactccaaataaaactatacaaaagcataatatgtacattgaactatatacaataatagtctccctcaagatgggagaaatctgtgatccctctctgctaactagtgacattaccagacagcaaggatactcttggcaaggtttgttgtcgtctctgcttgaaacaacccattaattttcctcttaattaaatatacatgtatgttttgtaataaagatgtaaataaaatcatatatatgaaagtttgccaactctctccatatgattgacacatcatcactttaatatttgtcatgtgtctattaaataattaatgtaagctattgaacttctaatttataggttaatgatatatttattattttattttacatattattttattttacatatttaattgtactattactaaatttattttaatattacatgattttttaataaaaccattttaatagttttatcatactcgaagatttttttttttttaatccaaactcaaagtatgagtgtataacagtcgtggattacttaatgatttgagtaagttattctcttaaattgatatttatattcttttaaattgatatttatataataaatcactgagggtgaaaaatatgtaagaagctctatcatcaaattcttaggtttttaaaatctaacactaccctctgttaaattggtttaagaaaaacattgtttataaattatgtgtatgatgcattgttgagaatgttgttagaattatttttttttaatactaaaagtttgcttattgcatgagccccataagaaatctgcattagacctactctaagcctttgaaataatatatatccccatctatccatctatctgaatgtatgatctcaaatatagcatttcctttcttttaagcttaaagtttttcactttgctgaattattggtatttctttatatgcaattgatagtttgtacattagatcactttttgtgtttgtggttgtgttgttgcgtgaattgaatttgttactctttttttctttgaagacatgctagtagatatttcatcaagttatgctacttgttagtgcattataatggttagaagaattttgcatgtcaaaatgtttatgctgcagaaaaaaaaagttattttgattttaggctagatatgtgaactcccagaatatttcaaaaattcattctctactttaagaatagacattccatcaattttgtagagcagatgattttcacttgtaatatactattactagattttaacccgcagtataccgcggggcgatttatattttaaaggtaatatatattaaaatttacaaattttatttttataaaatatttatatttaacagtttataattgatattaagtaacgctataccacaaatccatgagacaattgttaaaaaactaaagttttaacccttattaaaacaacctattaataatattttaaaattttataaatattgattcaaatgcaaccaccatataacccaattccaaaataaaacccgttttgtattttgaatattcggtatattttgcttcagtttaggaaatctttgatgacccgactttagatccaataaaccctataattaagaaatgaatattgtcgttaaatgattttgataaccttaatgacgtcattaaaagattttgttttttattaaatttttttaatggcaatgtcatgtaattaattacaaaaattaaggttacatttaaaatgtacttcccaaataatatagtaggatgaaagcaactcaaagatgtaaatatttaggctacaacaatcatatatataaaagtaaggtttcactatctttattgggccacttgacatttcttttttatattttattaaaaaaaacttagaacatattaatctcatataactcacttaaaactcatgtgtaactcacggacaaatttctggaatattgatcgtttacaagagctttttgatccggaagatgtctcgttaataagtgctttgcacttgggtgcgtcaactaaggaagatatcctaggttggcatttcacaaaatctggaaaatatacagttaaatctggatatcatacggcgaggttaaaaactttggatgctaatttttctttttttggcccagacatcaaagtcttaaaagcattctcatggaaagtacagtgtccgcccaagttacgtcacttcttgtggcaaattttagcgggatgtgtaccactaacggacaatctatgaaaacgcggaataaactgtgagataggatgtagcagatgtggtgctctagaagaaaccattaaccacacgcttttttttatgccatcctactcgtcagatttgggcactttcacagatacctacggtcccaggaaaatttccttctgcatctatatatgtaaatttggatcatttattttggcgcatacctttggaatttgatttatcttcatttccatggataatttggtatatttggaaagcacggaatgaaaaaatctttgataatgtggataaagatcctctagagatcttacatttggcggaaaaagagtcagacttatggaagtccgctcaacttgagcttcacaacgaaaattttggttctttcaatttggaagatcgtaatcgagtgcggcatttttctttagacaacaattattctggatatcgttgttttgtagatggatcttggaaagatactgacaagttttcaggcttaggatggtactgtacatcatcaactggagagacaccaactttgggagctgccaatctcataagaagtctatctcctttacatgccgaggtggaagccctcctctgggcgatgaagtgtatgattggtgccgacaaccaagatgtagtttttcttacagactgttcagatctggtggagatggtgtcttccccaaccgaatggccggctttctcatcgtatttggaggagttacagagcgacaaggatgagttcacaaacttttctctatctttaatctctcgtagtactaatgttaaagcggattttttggcacgaaaagttcgtacccaaccgcttcatattacatttgtaaacaacattcctcaggattggctcgtttgagtcctaattaattttcggatgacaaaaaaaaaaaaaaaaactcatgtgtaactccacatttaaattcatttgtaactcctccactataaattaaactctacatttaaactcaattgtaacttctaccaatcaataatagtttgtaactcttgtttattaattataagagttttaccacttctcatctataaatatacattctactatcgtccttcaccatattttcaaatctgtaaatctacattatttttatttattttgcatgagcttaaaacaattattgtgtcatatagtaatggtaagagtttgattgtataattttatttttagagattatatgatatgtaggttacattgtactcaattttattttgtttattttatttttagaggttatatggtatagagtttgtatcgtactcaattttttttgtctaccacattacaataatatttatattcatcttaatatttccaattttacgattttttatgaaatatttaaggaaatctttttaaatactaagatcataaaatttgaaatatttaaggaaatatttttaaatattacaatcataaaactaataatttatcataaattttgattttaaagaaaaataaattcaggtaccataaatttcggttactattagctagcatttctaaaattatgttttaaatttggaaaatcttattagacgtaagcatattccgtaaaatattcataatccttaaattaatttttttgtttacattttttggaataaacctaaattgtttgacatacttatatgggaaatttgtaaaactaccctttttttactacccttttaaaataataaccttttgtgttgtccatttttactacccttttaaaataatacccttttgtgttgtccatttttaaaataccccttccattgaacagaatgaccaaatgaccaaattttccaaccaaaaaaaaaatccgccaaactttttttccgccaaaaaaaaaattttccgccaaaaataaaaaaaaattccgccaaaaaaattttcgtgacaaattttttctcagccaaaaaatacttttaaaaattcttgtaaattttttttggcgggaaagagatttacaaaggattttaaaaatgttttaaaagatttacaatggattttaaaagggtttaaaatatttataagggattttgaagggctttcaaagatttataaaggttttttaaaaatttttaaagggtttaaaaatgttttaaaagatttacaagagattgaaaagggttttaaaatatttacacgggattttaaaagtgttttacaagatttacaagagattttaaaaggttttaataaaatttacaagagtttttaaagggtcttcttgtaaattatttaaaaatcttttaaaactccttgtacatcttttaaaactcttttaaaatttcttgtaaatctttaaaaccctttaaaatcccttgtaaatcttttaaaatacttttataccctttaaaaatcttttaaaaatctttgtaaatcttttaaagccctttgaaatcccttgtaaatattttaaaatcttttaaaattccttgtaaatgttttaaaacccttttaaaatcacatgtaaatattttaaaactcttttaaaatcccttgtaaatattttaaaacctttctaaaatcgcttgtaaatattttaaaactcttttaaaatcccttgtaaatctattttacggaaaaatatttttgaaaaaagttttggcgggaatgtttttttttcaaaaatttttggcggaaatttttttttcgaaaacttttggtgggacaattttggcgggaattttattttggaatattttaggcaaaaactattaatatttcattttgttaacataaaacaatttccaaataagggtaaaatgatcattaaaaaattaaagagggtagaaataaaaatggcaaataggaaagggtagaattgaaaaagggtagtgtgcaaagggcattctcagcaattattctactttcagtccctataaatactgtaaatatctagagtttattccatccttaccaacgttagttttaagaaaaaaaattatattttattctaacacaaatcaattgatattaagtaatttttttatcattatccttatatgaattagaatgtaggaaaaacacataaaaataaaagtatagtttgtattaagtctaaatatagtatgaaaataattactttgtatatctaaacagaaaataaaacctacaaattatcatatatctattttattacgtaaaaaaattagaatatgttttattgtacaataaaaaaaattgtaatgaaactcatactacacatttaatctttttacatgtgcgaattgcaagaattatatcgaggatcattgttgctttttaaattttattatcagttatatcaatatattttaaaacaaattcaactcttagataaattaagaatttattgttgaaatttgtggtttaaaattattgattttgataagttatatgtttattgtttttatttattatatgtgaatactcagctaatagaacaggatttgtaaaacaaatatttactaaaatatacatgtttacaaattctactatacactaacacacaacgtatatactaacacataatgttatactaacacacaacgtatacaactatataaactataagattcaaacttgatatagacttttatactttgtaaattatagaagttaacatttatccacactaattatccaccaaattaatatagaaaagatattgccaaaactaatagacgaattaaaacgttattcccgtgcaaagcgcagagcactgacctagattaatccaaatggtatgatttttttttattttttttaaatatttttacatattaattattctacacagtttatgaaatactaagtgtttttccttttgtatatgcatgttgcaagaattattatatgaccattgtttttttattttttttagtgctgccttttttatatacgattaaagaagtatgtagtttattaataattcttttaagtttttcttctataattctgattttgacaaaagttatgtttatcttattaatttgtcaaatttaataattaatttacatgtttataaaatacattataccccgacacaccatgtatacaactacatatactaaatatacaattatgtacacaaagagacacatcaattctataatatattcaatagtattcatgtttaaatgataccaataataaattcataaatttttaaattcaaaaattatacaagtaaacatttatagacaaaaaaaatataaaccatattagtaatatatacagaagcaaaatttataaaataattaaagcatgaatctcatgtgaagcatgaatcctgacctagtaagtgtttaatcaacaaacttttgttatatatgatttgagctctttgcacatggtctctccttctatgttatctctctttttatccattataaatttgaagaaatttgagttggcgttgttttctaaaatcactattcggtaaaaaaatatatgatatagtcacagcatagagaggtgaccatcaagccgtcgagctttaaagaggagcatccactatgaagcctttactcaaaatcaatttctagcaagataatgtggaatgcctaagttaaggaatccttttgtcctcgtgtccatctttcaatccccaaaatatcttttgtgaacatttccattttagctattaattgacactgaatacctcgctatagactattcagtgcttcagttattgatgttttgactagtttgtttgagatatagtacaaacatagtcaaccctcattttgtatcaacatcaagttctcaagatgggtttgagagacaggaacatgattatgtagatgatcatgactttatgaatgtgggggttgaaggtttagcttctgtttacgacaagatggtaaatgaagaggggtttgatgcaaccaagactaagcttgatgtgtacttgaaagaaagtgttgaaaacacaagggccaatacattgggaacaaaatatgatgtgttatcatactggaagctcaatagtcttaagtttccgattttatctgtactagctagagaaattctagctttgcaagtttcttctgcagcttctgagtattgttttagcactagtggtcggatcgtagagccaaagagaagtttcttaacacattatataattgaggtcttgatgtgtacagaacaatggatgaaggctgactattatattagtgaaaaagttgtggaaaactatgcaaagatggttgaggatattgaagattcggatgatctggagaaaggtataagtgttggcacttgtccgtttcttactttcttttcaaagtctaataattttatgttttcttcaatgtatagagtttgacaatttgtgtaagagactagagacttaaccaagacaagtcatccactcatgaactcaggtacgtgattcagattcttcagtttttgtgacatgtatttgagttttactaattaactatgattaagtttaaaattgttgtgacatgtctgactttatcattcaattttgtagacaagaaaaaaaggtatggtaaagaagttctcaacatggtaaagaactaaagattaaagaagttctcaaacttttcaactctctgttgagttttaactctctattttctctagaaagcctttttaatttgagtttgatttctcgtttgtactttcactctcttttggatttgagttttaactctagtttgtactttttaattgttctattgtattttgaactttgtatttggtaattttggtcaatttggtcactttttgggtataatgtaatggtccgaaatgtattcggttaccatatggatagtaaacttagtaaccgaaagacccgataaccaaatggttatatccaaaaccgaaccaaaatgtgttcggttaccatatggatagtaaacttagtaaccgagaattaaagaatattcgggaacaacaaagggaacaaaacaacacttgagttagttatggagattctcaaagcgatttctaagcggttatttcatcggtttatcctcacctttttggtgacggttcacagcgttttcgccggcgaagtggttcccaaccccattttccctcaggcggttatctccatgcttgatcccacgatcaatcgtgatgtttattcggttcccaaacaccttcatctatttaagcaacgaattgtcgattggggaatggcactttgtcttctcatcaaattctcaattttttacccacttcgattctataaaaacctctcaaaaatggcagacaatctcaggcgtgcagttcagaacatcaatctgggtgcagacgaagagcccatagcgatcccaaaagaaattgtgaatcaagcaattgccgacaatcgtttcatcctgattggcagaccggtgatacctagacgtcagaacatccgctccatagttgcttctttaccgcgaatatggggacaagcagggctagtttcagttcattttcccgacaaaggaatccatggagacggttctgaggcgtggtccttgggccttcaacgacagaatgctcatcatccaaagatggactccacaactgcctctcctcgacttcatccctttctggatccaagttcgtggcatcccctatcaattcctcaaccgtggcgtcgtcgaacacattggtcgttcactcggtcaggttctcgatgtggattttgacgttgaagtcgtggctagaatggactttgttcgcattctcattcactggaacatcactcacccacttcacttccaaaggaatttccaattcgcgcttggcaccaatactctgctccgcttcagatatgagcgtcttcgaggtttctgtgaagtctgtgggatgctcacacacgattccggggcgtgtcttatacagaatggtggagaagatcagcacgacaatgatgatgaggaggatcaggatcgcgttcagaatcatggtgtcatcattagggagatcaatgatgaggatgcaatggagttggcaaacaatcaggacatcaatgtggtggtaaatgaatcagaagatagagagaacggaggcgatgcggttaacactccttcacccgctgattcaaatgaggccaggctctcagatattgatccacatcacgatgcactgattgactacgaacatactgatatgttcagtgaagaacgaaacgatagtgaactcttaaatcccatcccgtgttttgagaactcttgtggtgatattcctggtaatcctagccacaacatttattctcaaattcacccactggcgcttatggattcagcaatcgtcatcaatccttcaactgaagttgcaaatgagtgtgggaagcgcaagcgggaggacgtgctggatttttctaaggaacagggaaacaccaagttcacggtgtgtgaaaggggagaggggagtggaagctccggtgaacacaaccaaggcggaggtgcggtgggcccgaatccaccacttccaccatgaagacagcctgctggaactgtcggggtttaggcaatgactccacagttcgacgcctaaaggagatcaacagattgcatctcctggacatcagtgctcttttagaaacaaaacagcccgatggttttattcaagaaaagggtttggaaatgggttttagtaagtttgtaacagtcccgcctatcggtttaagtgggggtttagttgtgttttggcgtgatcatgtagatatgtcaatttgcttcagttctcctaatcttgtagatcttttcattaaaagtaatgaaggtgatttctatttatcttttgtctatgggaatcccaatcctaattatagaaatcacctttgggaaagattagaaagaacatatactgtgagaaaagactacccttggattataatgggagacttcaatgagattatgagtaatagtgagaagaagggggggggggggggtagagtgagaactgaagcttcctttcaggatatgagaagaatgttcgatgctgtaactttacagatttgaaatcaactggagataggttctcttgggctggacaaaggggagatcactatgtcacatgttgtcttgaccgcacaatggcgaatgctgaatggcacaaccggttccctgcctcagagacagagtttttggagttcggcgaatcagatcaccgccctctagttacatatatttcagaccagatagaggaacgccgaggctgcttccgctatgatagtagattacttcacaaagacggtttcaaggagatggttactcgagcttggagaggcacaagacgtcatgatgagggtattttactctccaaaattgttcactgtcgtaagagtatttcagcctggaagcgaagcaacaaaaccaactccgagactagaatcaaatctatcaaggctcaactggattgggctattgcaaccggaaatacatctacccatgatatcgcaaccttacggagaaacctgaatgaagcgtacttggaggaggagacttattggaaattaaaaagtcgaaatcactggctacatacaggagaccggaacacgtgttactttcaccacactacaaaggcaaggcgtaataagaacagattactttcggtccagaacgatgatggtattcttaagaaaggggacaaagaaattgcagaggtcgcgaccaactattttgcagagctttttacggccacaccaacttctgaggagacgtatgaggctgtgtttcaaggatttcaaagcaagataactgatgagatgaatgaagacctaacaaaaggagtcacaatagaagaaataagagaagccgtgttatctattggtcctacaaaggccccaggccctgacggttttacgggagatttttaccaacaattttggaatgatatcaatccggcaatcgtcgatgaagtgcagatgtttttcaccactaactaattcgatccagctcataatcatacaaatctctgtcttatccccaaagtggttcccccaacaaagatgtctgactttcgaccaatcgccctctgtaatgtcagctacaaaatcatttcaaagatacttgtcaaccggctgaagaaacacctttcaggaatcatatcagaaaatcaggctgctttcattccaggtcgcatgatcacagtcaatattatcattgcccatgaagtgttctactccctaaaatcaaggaaacgtcaagcaaattcttacatggctctaaaaacagacatcacaaaagcctacgaccgtttggagtggagttttatcgaaaaaactatgacacatatgggtttcaactcaacatggatcgcttggataatgaagtgtatctctacagtcagcttttcggttctaatcaatggttctccacatggtcacatcaaccccactcgtggaatccgacaaggcgatccattatctccctatatattcatactttgtgctgaagttctctctcacatgatgaaccaagccgagatcaacaagcagcttaaagggataaaactatccacaagaggtccatctatctctcatcttctctttgctgatgattctctattttttactatggcaaatcataggtcatgccatgccattaaaacggttctacgtacttacgaggaagcttcgggtcaagcagtcaatttgcgaaaatcaactattacctttggcaaaaatgttagcaatgacataaagcgaagaatgagaaatctcctcggaatacacaatgagggaggtggcggaaaatacttggggctaccggaacagtttgataagaagaaatctgagatgtttcggtatattgttgagaaagttaaagaaaaaactcaaggttggagcaagaaatatctgtcacaagctggaaaagaggtactactcaaagcagtgctttagctatgccaatctactccatgaatgtgtacaagcgaacaaaagagatttgcaatgagattagtggagtactagcaaaattctggtgcggttcagacgctgaaaatcacggtatgcactggtttgcttgggatcgtcttgctttgccaaaacaggagggtggtcttggttttagggatcttgaaagttttaatttagcattacttggcaagcaaacgtggcgaatgcttcaatatccagagagtctaatggcaaaacttcttaaagggcgatatttccatgattcaaatatcctaaatgcagtccaagggaagaaggcctcttttatttggaaatccatcctacatggtagagatttagtcaggaaagggcttcgattctgtataggtgatggcacaatcgtcgacgcttggctggacccatggttaccaatgcatccccctagaccaagtgactccaccacctagaaacgttctcttgaaacaaagactatggaaattaagaactgctccgaaaatcaaacacttcttctggcggcttctatctacttctcttcctactggtgcaactttgaggtatcgacatattactaatgatgctaaacgtgtgagatgttgcagagaggacgaaacggtcaatcatctcttcttccgctgccattacgctcaagtcatatgaagaggctcgagaatcccaaatcccatctttctcgaccaaactgctccatgggacgataaaattcgcgccatctttaatatcaacacctcagcacgaacatctcatatgagacagttgcccttatggatcatgtggcgattatggaaaagtcgaaacacacttatgttccaacaacaaagtatacactggcggaaaagtctaagattagcgaagcaagatgcatgcgaatggcaagatgcagaagattatgttcaaaaaagctcaagcgggactcagattctaccctcaacggttaatattcaaaaaaattggacactcccacctagcggctggacaaaatgcaactatgatggtactttcaacagagacttgccaagtaaagctgcttggattatcagaaatgacagaggaacgttcttaggagcaggacaagcggtggggataacaacaacaaactctcttgagagcgagttacaagctctggtcatggcaatgcaaaattgttggagcaaaggccataagaaggtttattttgagggagataacaaagaggtagccgatacaatcaatgacaggaatccaaactttgcggtttttaattggctaagagaggttgtggcttggaaaacaagatttgaggattgtcgcttcacatgggttcgacgaaattccaacatggcagcagacacattagctaaacatgcactaccttcacatacttcttatcatttttctagttttactcctcatgtaattacagacatactccatcgagactttgtctctgcagttcaataataagattgatgttgatgaaaaaaaaagaaagtaaacttagtaaccgaaatatccgataaccgaaccgaatacccggaaacccaggattagctatagttaacaaaattaaatggataaaacaaaacgtacggttactacaaaatatccggcccataaaaggcccagtgatctctgaaaacatgcttcatgtcagatagataaaaaaaaaaaatagttattacggtcaaactttttttcctcttctgtgtttaaatttccaaatctcagtgtaccccacaaaacaaaattcgaaaaacctcgcaacgagcgcgagattcaaaaatcaaaatcaacaacacgcgaatcaaaagaaactgactcacacgcgcctctctcctcgaactccgtctcttttctctgctaaaacaaaaatcatctctcttctcgctctctgcttttgaatctctcttttttctctccaccacctgagattttcccatcactttcccggaaaaagcagcgattatcttcatggcttctcactcaccactatcccactgatgcttcagagtatgtttcgctactctctcttccccttaatttttcactttctctgcatttttctgtgttgttctttggaattagagtaatgcgcgatgaagaaaatggttgaatcgttactttagagtaattcgctgttgttttttggttattatcatcgtcttctatccaattttagagcgaattaagtagagattcgattttgtttagagtagagaaaatttcgaattcgctgttgttttttggttattatcatcttcttctttccaattatagagcgaattagggagagatttgaatttgcttcttcgattcaccagatccttgagctacatgtctcagactcaattctaattccttgttgcagttattggatttgaggaaggattatgaagacgaacatgcaagtaaaaggaagaggaggaaacatgaaggctaatactaatacacaacaagtgatttttgagctgaagaagaaggttgttattgcattaaacaagttagcagatagagatacatatcagagaggagttgatgagcttgagaaaactgttgagcatttggcaccggataaggtttcatgttttctctcttgtattttggatactgattctgagcagaagagtgctgtgaggaaagagtgtattaggttgatggggactttagctaggtttcatgagggacttgttggtccatatcttggtaagatggtttctagtattgttaagcggcttaaggatcctgattctgttgtgagagatgcgtgtattgagacaatgggtgttttggcttccaagatgagttgttatgaagaccagaactttggtgtttttgtttccttggtgaaacctctttttgaagctattggtgatcagaataagtatgtgcagtctggtgctgccttatgcttggcgagagttattgatagtagtcctgaagctccagttgcgattatacaacgcatgttgatgaggacagtaaagctgcttaataactcgcattttatcgcaaagccagcggttattgagcttaatagaagtatcatcctggtaagctacttctaataccatataagtcattttagtttccgagtctgagcctttggtgctactattatcatgtggttgtataatgaaaaatggttattgactttaatctaggctggtggggcaacgtcgaagagtgtgttgtcctcagcaatgtctagctttcaagatgcccttaaaaataaggactggactactcgtaaggcagcttctgtagcacttatggagatagctgctactggtgaaaagtttcttggacctctgaaggcgtcctgcatctgctctcttgaatcatgtcgctttgataaagttcgaactcttttgctcaaattcactctctgacagatgataacttttggaatgaaacatctaactttgtgcttttctattttaggtgaaaccagtgagggactcagttatccttgccttaaaatattggaaaggtgtccctgggtctgatagtccagagccatctgaaactgaatcctctgtaaaaggtgggtttaggaaatgaatcttttcttcaaatatttttttttttgcaactcataagactcatagatgctctttctgtttatttgttttgtaatcacagaaagttataatggagctcgagagagtagtgaacttttcagcaccagtgactttaaagtgaaggatggtatgtctatcaaatatgtaacggatgtgacaaggaaaaaggttccggtctctgccaggcaaccacctacacgttacaatgacgaccctcgaaagagtaaccaagatgattggcatattgaaattgcagtcccagaatcttcttttgtctccaaggttgatctttacaatgaagaatcagagggcagttgcatcaccaagacgtttgcagaaacgacaaacacgccagaagtgacatatgagtacattccaatgaaggataaagcagatagctatgtaacaggcggagtcaatgaaaacgatgatatcaagtctattacagtttcatcaagcagtttccgggcaagtggtatggtgaatccagccataacgagtaagaattatgcagctgaagaaactgatttggaagagcagccattctcaacccaagtgaaggatcgtacaagccttgactcttttgtaacagtgtcgagctctcaaattaatcatgactgctgtgctaagattgcaaatgaaatggcttctgtacgtaaacaactctcagatattgaaaataaacagtcacgtttgatagatcagctacaggttagtggattatctgtcacaatctaatgtctttacccagcttacaaatttatagatgctttagtcaacctttgtatcttcaagatgcgtgttctcagtaactaagtttcgtcttctgttaaacttataggtcttttcaacaggaataatgaacaacttttcggttcttcaatccaaggtatcaagcttagagtatgcagtggaggggatagctcagaacgctgccttgcattcagatatatcaaactccaattttgtgaagcacaaccaaggtagtaccatatcaccgaggctgtctagctgtacgtcaagaacttcgacggatatccgcaatcgacaatctacactatccacttccaagtactcaagggagaacaaaacacatgtaagaagcagactaaatgaatcacagggcatggagaagacacggagtaatcctttaggtaagactggtcaactacatactagagaggacatttggaacaacattggacagggaagacaaacattgatccagacccggacatcttctgattcaattcaaagcattagacaacagtatgcagaggtgatgagtggaacaaggaaaccagtgacaggtgtttcttgtgaagatgtggttgaatcagagtatctacaagtgctttcttccggtgatgagcttgcacttgttgagcttcttgacagaacaggcccggtgctggagagtatgtcatcacagaccataaatgaaattctcagtattctattgtcatacctcctagaacgaagattcatgaattcaatacttccttggctgcatcaggtaagtttgttgtagtcatgcttgaattgctactactggaatatgatactgaaaatccactctattctcgtccactaggtcgctgacttgagtactacaaatggagctaattatcttattccatctgcgagaaagagagctcaagtgttgtctgcaattcaggaggcttcaggcatggacttttcaaatcttgctgagaggagagcagttactcaaatagctatgaagttgcgcaaactatggggtaagctaagttcgtctccttgcactagtccctacttggtctaacaatcatgcactgaaaaaacttgcttatacatatatgtttataaacagtgtacattcattgaaactataatctttaaaatcttcatattactaaaagttttccttctctttttctgcaggaaaatgctcttgatcattatggtgtgctgaagtagttgaattaaacttgttagtgtgggaacttgtgaaaacttctactccttcctttgttttccacgtgtgtaacacatgaaatcattttggaaacttctactccttctacttgcttgtttcatctcttcttgccaatcgttctctacaccggctctttttgcattgccttcgccttcactctagtttccgtctgtcttgattcaaaccataaacggagtggcaaatcaacccagaaaattaaacaatttggtgggaatatcaacaacagtcatacgaaactgcaggaaaaagcggatcacggtttagatttacggtttgaaagttataaccaatttactaagacagagccggaaggtaacaaacctgcaagcagtcaactttggaaacaatttcccatcaaacagcaagacaactagaagatgatctttatgtccatggaaagatctcgctgtcaagtttccagaacatctttcaagtctaaaacccaatatctatagccaaagaaatgaagacgacaaaaccaatgaaaaaccatgtcgtgttgtgtattgactttacttgattttccactacagcatgtaaagtagattggtgacaaccggtttaccgatgtaagtgtgcgtctttgtgcccacaattaacactttgttcagaacaatctgcacaagagaaagaattaaagatatgaacttcatgaatcaccaaaaagcaacaaagaacaacttaacaatgttaacatagataaaaacagaacatcaacaaaacatttgttcttcatcttccatggttactagacaaatgaagaacacatcacatagaagaattcaaatcaaatgtgcctatacttggtcatcgacatttgcatctttctgcctcttagtgtaaaaatatctccttggaaacactaaactattcaaccaaagagaacaacactaaactaaattagagatagtaatacaaaacatatgttctgcatttcaatacaaaaaccaaactttagaaacccccaaaataggtggagtctgtaaactctgacacccatacatgatttcttctaaccgtaacacaaaattgacgaacaagattatagcaaatctaacaccatgagatccaactcgataaattcgattacaacataaaacggttacttcataaacgttggagaaagtcgtgtttttctcggagaaagcaaagcaactcgtactgttttttttttttttcaaaacaaaacatcgaatcacatgtggacatgtgtcgccactctcattttctcaaaacctcacttcacagagacgactctcccatttttaatcagttttgattaatttttcatcccatatttcaagagaacctccaatgtttttaaacccgacacggacagtgaatcggactactttttgggtcactggatcatcagatcaaccaggttggaccacggatcaattgattaaaatttatttattaaatgtaatattaatagagattttagagttttcagagttcttataaatttaaaaagaaaaataatcatatcatgtttataaaatataaaatcagattatgtttaataaaatataaaattatttagaccaaaaaaactgaaaacaaaatatatatatatatatgattaaattttttaaatccaactaaatatctaatatcgtaacaaatatagtaggagatcaccaattacggaaataaattaataaaacattgtaaattcacgcaactaatatcgggtgtctcagtcaccattcgattcattttttaaggcagcattgtgaagtcttcacaaaaatctaaaacatcaaatgagtttaagaactgaaattttttctaaaaatgattgaataaagtttaaaatcccatattttattccaacatcaagagaattttttaaaacccacacccggccggttcaaacggttcaccgggtcacgggttaatggtgaatttttgagggttttttcggttttgaacttgtcgggattttagcattaaacccaaaccggaaaagtgttcgggtcacggttcaaccggtcggaccggacggtccgagtcgggcgtgaaaacgctgagaacctcacaaattttccaacacaacctcccattggagatgctctaaatatgttttgaaagtttcatgcactctcactgaagttacttgtcgacgacaactaacaaataatctctccaaaattcatttgaatttcaaagaaacatcaaattgcatattgcactaatatttgtaattcaaaaagaagaagaacccgaaacgaagactcaacttatttatacattttaagccaactctgctactttcttatcttacagtctcaaatcactggtgaatcattctgtcttgagtcttaaattttggtagtatccggttccgaaagagtagaaacatatttttcagtgtcgaccgcggcttcgctcttgcttctaccactttccggtcttctcctcctctgtccattcccatctcttgtgccttgagaatcgctagaagcttcatataaggttacagactttcccctactatgaagattagtcatgacttcctcctgagcatctccgtcgtccttgagagtctcaagaacttctacaacatgattcatgagaggccttcctttcgggttttggcttaggcattggtatgccaaaccagctactttcatcaacgccttagtgccgtactgtccatccattcgagggtctatgatcctcaaaagctttttgttgtgattcaaaagaggtcgtgcccactctaccaagttatgctccctgcaagctctgcttttgtccattgccctcttcccaaggagcatctcaaggagaagtacaccgaatccatacacatcacttctggatgtcaaatgccctattacaacaatcacatatatgacccatttacataatgtgatcgtatcaacatgcatatgcttaaaaagggtcctttttaacactgcttgacaaaacagccatgacttttaaaaggttcttgtgtcaattaaacatgctgaattcagacatatgctgacggaaagtaataaagacagacctgtcatgacatactctggagcagcgtatccgtaagtccccataacacgtgtagacacatgtgtttggtctcctcttggaccatcctttgccagtccaaagtcagagagtttagcattgtaaccctgcacaagcattacatacacctttcaggggaaacataggcggacaaatagaaaaaccaagtcatttcactacctttgtagacactatctattgaagaagaagaattaaaaacatatgtaatctcaaaacagaagaggcaatagctgacctcatcaagcaatatatttgctgtcttcagatcccggtatatgatggagcgttcagcaccatgaagaaatgcaagacccttggctgcgtctagcgcaatcttcattctttttgtccatgtcaaagtgcatccaactcctgtcaagtgaattcgaaaagacgacacatttcgtcactactccttctttataatatgggaacatatgctttatcaattcctcttcaagatacttataatgacactaagaactaatctgtataaaccatccatacgttccacctttagtcacgtatatgcgatgaatatgaaataaacttacttcggaaaagatgtttctcaaggctccccattgccatgtattcatagactaacaatctatgatcatcttcacagcagtagccaataagtttcaccaaattcgggtgactcagctgtcctaaatagttgacttcagcctaaaaaaacaccaacagttataaaaaaaccacacattcccaagtacataacgatatatccaacattaccagccactctctatctccttggaaaccctcaggattaagttctttgatagcaacttttgtagacttgaaaccaaccctcacagactcatctataactcctttatacaccactccgaaacctccctcaccgagaatataatccggcctgaactgcttagtagcaatcttcatctcttcgtaagtgaaaatatcaacattttcatatcctggatttgattgaagatctttaatgttttttggagccaatggcaaaccaccaccaccacttccacttccactcactttaccaactacatcttcacaatctgacttcattagatacactgctgcttttttccctgctttccataaacatctcatcacattcagaaaatttcatccaaactcaaaaatgttttttttttttttttgtcatcagattttatttagatttcagaaaagccaattacgaggaaaattgtttacaaaagtgatacgtagcggttcagtacgaatttttcggttcagtactattttttttatcattaagaaacccaaattgttattttccaatagaaagaaaaaaagaatcacgaacaacggcaaaataaagagagagagatccaaatctgattgagacctggagttgttttcttaggatagttttgttgttgagaaaattggtagtgctgatcttcagcgctaaagcaaatccccatccgaaaacactctctctgcgttctctgttattggattcccatcacatagtcgacagatccaggaaaaaaaaaaaaaaaaaactccgatctctccgacgagactccgagaaacttgctgatgaaactccaagggcaaaaatggaggaggagagatgggtttctcggaggaggtcggagaaagagagagaagaagaaagaaaaaaaaaggaaaagaagataattgtagagagagagagaatgaatgatccgttggaatcgatggatttgagactagccgccaaaaacgcaaggccaagcgaaacgacttgacttttttttttccttgttcaactgttacgttatgttaaaaaaaagtcctttcacatcggttttaaatttgcttatatacgttttgttttgttaaaaaaacatttaagataggttaagagatttaagatttccataaaactacacctactactacttaccaaattttattaaaaactattattgagtttccaaatctatgtcaaaacgtttggtcaatggtcaatattttgaatgtttgtattgcattaactttgatgttgactaattttttattttttggataatttgcaaacaaagcatattttaacattgtttaaaagtttttaaagttttaaattttgtaaatatttgaactttataagaagtttaaacatataaatattaaaaagatattaatacggacgatatattacgggtgaaatcctaaatgtaacaatcaatatgcaattatgaagtttgaatcgatattaaaactttttgaagtttctaatattataaatattcgaacttaataaaaaaatgacaaaatgatgattaatttcatgggacgaggttaaatggtggacgggtttggattgatattaatacgggatggtatactatggatgaaatcctagaattaaaaatcaaaatacaattatataattttaaacactaaaaaaatattaacgaaacaaatataacttaaaatttcaaaaagaaaattaattaataaaatcgtcatgaggtgtatcatagtatcatacataaaaaaaatagcatgtatctataaatcatcttaaaaaaaaaattcaatttttttatttaaaatataggcttatgatgtacctcttgaatatgtaatttatatataaataatattaactaaaataaaaatctctaattttctaacaaaaatattaacatgcggtataccgcgggtcaatctctagataatacaacttttaaatctttattacctctaaaaaactctaacaacaaaaaaatactgaattttaatattcaattaatgtacaacaaatatcagaagataaaacatgaattacccaagcttaacatatataaaaattaggtgtcaaaaatttatcattcatatacaaataataatttttataaaaaatttatataattttaaataaacatattcacccgcggtacaccgcggataaatatctagtaaaataatcattatggtgaaagaattcattgaataagtttagattgaaagatatcaatttatgatcttatcataattatatatatattagattaataatttttattgtgcctgaatgctatgttattaacaatcttatttattagaatatatgaatctatctaatgataattatctaatactattatttgaaaaatacatttatttaagtggacagaaagttgaaaaaaataacaaatttgctatcgggttaaaaattttatgtcatgaaaaaatccgtttagaaatatgtgtatcctttagactatctacaatggcttattgaaaaaaattattcaatagttgaatgcttacaatggggtattgaataaagaaatgaatcgtatgtggattaaatggtgttgaaccgattcaacattgttgaatctttaaaaatggacccctcattgccatttgtccttaaatgattggagacagaagttgtggggagagttaaataaagataggacatatgttgctcttttatttgctactgagatttatgatattttattttcctctaaattattagaaatcaattatcttataaaatatttatttgttttaaattatttttacactaaaattcatcatttttcaaactctataaataaagacttgtttcatttgatttggacacagaaaaaaatatatttattttcactataatttttttattagtcggtaaactcgtgtctatatttttattctgtttttttcagtgaaatggatccccacaataactcctttaacaactaaaattccacttattatccatttaaaatataaaagaaaagaaaaataatgaaataaaatgttttggggtagggtgttgaatttttaaaaaaaaccattgtagagtgtaaaatttgagtgggtattgaattattatgtggaagaaagaggaaaggatgtggaagagagagaagatgatgtggagggtgttaaatgaaaaaaccattgttgatagccttagagcaggattttaaaagtcagattatcgcatctaatcttggaaattgaaatgcagtgttatgagccgttgattttttgagttgaaccgaataaaaaaatcacgcgtctatatttcatcaaccgaattgcattaatttcaaatattcattgcttatattcctatattgaatttgaatatatcacttctccataattataggtaatcaaatacttactttggatcttcattttgaattttcataaattttcttaacgattttcataattaaataactacttatatggtaaatggtaaacattctcctataattatgggatcatcataatcactaaacatggattccacgattttgtattttgtccatattttttgacataaaaatttatatcttataaataccgtaagtcccatttcaataactcactcagcaatacctcatactctattacattcatttcgaacttatcaccaaaacagatgctcgctaatcctcttccatttgcttctttgagatcactaaagccttacaagaacgcttggcgtattcatgttaaattgcttcatgtttggaggcaatactctgtaaggctggtaaatccatcaaaatgattttggttgatgaagcagtaagtattatattctatgtatttattttccataatatatattgtttctggcaagtatcatattcactgatatatatatatatatatatataaatatttgtatatttttaaacttatagggtgataaaattttatctgctgtgagaagagagtagatcaaaaagtttgaaaagagtttaaccgaaggtgtttggaagattattacgatcgtcactctcaatcctacaagtggtgagtatcgtatttctgacttgaaatacaatattgtttttgttttcaaaaccacggtctctccatggataacgtctcaaattattagtttgtctctcttgctaagtttgacgtgatcttttctggatccgctaacacaaatctcgtcatcggttagtttaacttttaaagttgaacatacatgccttattataaagtcaattatttatattttttctcttctttgtctatacagatgttattggtcaagttgttgaccagactaaaatccaagatcttaatgctaacaacaagcccaccaaaaaaattgatttccaatatgagagacatgcagtaaaagaaatttctatttttattttctaattaaatgtttattatttatttatcaattttttctttctatataagcgacactcgcttggcatgtgcactttagggaaagtatgttaagattgttgataaagcttgcgagaaatcaactgatggtattgttgtttgcttaatacgatttgcgaagatcaatctctataacggtaattatattaatatgcatatatatatgtaatatttcattttatatatacgcagataataagagcatttccaattcatttgatgtttcacaagtctttgttgatacaaaattggttgagttggttctttttaagaaaaggtaaatttttatcccatttccaaaaaaataattactgaaaagatgggactcaagtagactgatgatgggagctgcaattatgagaaatggaaagatgataaaggatttttggagtagattgctgaaaagagatggaaatatttgcataaggaaattgatgactgacattgaagatgttaagaagtggagtgagaagaaggacataatccgttttgtgtatatttgtgtgatagctgggttggtcatggctacgagtgaaacgaaaaagatagatcatttatatatcaagatggtaatggatcttcataacgttcgtaattatccttggggtcttaaagcttatgataatctactaaattgtatcatgaaagcaatatatgctctgaagaaaaccaaaagctatgttctggatggattctcatatacacttcagatatgggtgatggaagcaattccagaaattggatcattgttgggagaaaagattagcactgaattcaatgaaggtcctcgatgttctaattggaaaggtgctgcaaagatatcatatgaggacatcatctctgtggacaggtcatttaaatcacatgtaagtttacagttctttatcttcagtttaaaagttttaagaactaagggttttgtaattgtatgaagtactttaactagtagtttgattatctactatgattttttaaatgtttatttttatttttctgtaggctgtcttttatccatctatttcttattttggaaacgaggtcattaacgacagagaatttgtatggcgtgatgaaatcagagatggtgaagtggataatatgattgaaaaaataaaatctaggaaagattttagagaccatgtttgggaaagtgttgtacataatcaaatagaaggcgacaatattgagaatgtgcaagagaatgatgtccaaggaaaggatgatgtaactgaagatggtaatgaggtcgatcatatgagtggggtaactgaagaagggaatgaagagaaccatgtctccggtatgaacaggagtaagaaaaaacaatctgatcacggtgcagagacacgcaaaaagaagttgctttgtcaacgagcaacagcaacaacacatggagctttaaatgacaaaatgaattcctttcttaaagcattgattgattcttcttttgagaagtttgaaaagcgattgcaatcaaaagaggatgatacatcactagtggagggtttggtctctacatctgaaactacaagaaaaacaacgagattcacaacttcgcaaccgtccaatccaacagatcagccaagtaaacttgtagtacgtataaatctaaatcttgtagatatttgaaaattatgtacttgtagttcttgttttaatgtttttgttcatcttttttaatagcaggacctaatgtctttagatgacgatattttagactttaatttgggtacacaagaatttttagataaatctatgggacacttatctcaactgtcacagctatccggatttgattccacacaaaatttggataaatatattcctgacgtggacaaaaatgacaaggatgctgtattggtgtttgtttcggaggctagatgggaagcttttagggagtgggatatgaagcacgagtaagtccattgtttttctcttaaattattagaattttatgctttgtcaatcaattaaattatcatgctttcacattttcaaagacttaaaatttggtccaagtgttatcaataaagcattactcggtcgactcttgccttctagcaaatggcttggcaacgaggtgcgttttaccaattgtcattaactttgcagtacatactaagtattataaagaatttgtggtgcactgattactcaccgatttaatatttttcaggatatggatgctacaatgcatttatttcgagagaaatcatctatagggcgactgaatttagctcgtgttggtttattggactgcatttttggcgtgcgactcaatgttgaatacaaaaagtttgtgaacaataaacgaagccaccaatggagtagatttatctaagattatgccaacggcgagtctccttctcatgggaggacaagaaaacagtggggatcaaattttgaccgtattacttcccgctccatgacaatggtaatcattggatttctctgtgcattaacttcattcaaagaacggttgaaatctttgattgtgctggtcacaaccatagaagtggaggcattcgcaatcaccgtcccacgaattctcaaggaaattcacacaaaatcaaatggaaaaatctactattggctccgtacactctcgtccatgttttggtgccgcctgacctcaacaaaacatgttgtgattgtggagtgtatgcgctcaaatatatcgagtgtcattttatggggctgtccttggatatgttggatgatgtcaacattaaagatgcacgtctgaggattgcagttgatctatggaaagcagcatttgatcctgtattcattgaccgaatgacaaagtataaaccaccaaagataaattctgaaataatagatattgcatgagaaacaaatacacactaatttatgagacttttgttactttcaaacaaacaagccaaaacatttccacaaatatagtacttttcttagtttatatttgattttcgtgtgttcagtatattgttttgtgtgttggacaagaatttgagcgtcaaactgttaaaactgaatctcattgataacatactcgaaggtccattatcggagagcataactcgctccaaaaccttgttagaactcgataacatgctcgaaccaaattgcatataaaacacgtcatatatcatccaaaaactgaattatcgtatctaaaacccgtcatagataaaatataatagttagacaaattgagttcataaaagaaaaagagtaaagaataaaatatagtcttcttgtcccaacgatcatacattcaaaacaatcctgaaaaaaaaaaaaatcacacagtgaatttaatgataatgaaataccaattaacactacttcatgtgagaattagaattattgaacaaaccattattatattgctatattacatgttgttctattgtgtccttcttgaccacaacaaccacacctatgcctcttagacccttgtgatctgtttgatgatcgtatattgtcttccactgtttcgtgtcttcgttaattttcttcgtcgaccagggcctcttcgtgtttcaagtggtaggactttagcattttcgacatgttttaggacacgtcacttattttcaggaataactattggattaattgtttctttgaataatgatctccaagctgcagttacatacacttcatcatcaaattcatgaagctccttaccgattgcaaaaacagcttttatggcatgacgacacaaacttttccctaactgaaactttccacatgaacatatctttctttccaagtcaacgacgtagttagatgactcacctttaacttgaaatctgtattcggtaaccggataaactttcagtgttttacctttttctatcctaccatcaatctttttctccacttcaacagttaaagggtcggtatgctttgcacttaaagctctacgctcatgaaaccatcgtgtcaacatttaatgttgtctaacaaaggaattattggatactctctaggagatctcaacactgaatttattgactcagcaggattgttggtgttaatgtcgtacctatatccgggaaaatgacaccaaacccattttttcacattagcatcttgtaggtatactccaatcgctggactaatgttgctaatttgcgtcaataaaccctcaaattcagtaaccctatatgtttttgacgctttggcaaccatatcaaccaaaccccttccgtgatagtatgttatcacattattcagcaagtggtggatgcaaatcatgttttgctaatgggaaaattgtagcaattgttttaccaatcgagagatgtctatctcacacaaaaactaaatctttctcatcgtttgtaacaaaattaagttgcatgaaaaaccactcccatgaaagatcattctcagaatcagcaatcccgaatgcgattggatataaattagagttaccatctacggctgtagaaactagtagaactcctttgtatttactcttcaaaaacgttccatctactacaatcacccttcggagtgccttgtagaaccctcttattgattgaccaaaagaaataaatagatacttgaatcgaccatcacaatcagtttctaaatttgtatacgtaccaggattagcttcttctagcatatacaagtattttggtattttaccataacttttctcaggtatccctctaacctcgttaattgcatactcccgagactcccaagcttgggaataagatagctcacatccatattctgtacgcaaaatattgatgatatcattgggtttaggcccttctttacaccctcgtatctatgcataatgagatgtccaattgttcttgctaaaggtgttctagagactttttttttctttgaaggcgcacaatcatgtttagcaacatacttattgattttgaaatatgtagacccctttaaatattctgcccgaagcctctatttgcaaccgttgtctacacatcgaataccccaaaatgtcgtatcattttagtaactctttagtcgaagttatacttcatcgcacatatttctagagttgccggtacaacttccttgcttctaaaatattttcctttctttacaattgaatctgccaacgtagattcaacatcatcacaaactctaccaacatttggtgtatccttatcaaccaatactgcagatttttacgcacgttacggtcatcatctcgttcgatttaatcacgtggctattcatccaattcgatatccactctactcctttgatcatcgcctttaactttaaaggtcacacacaaccgcattaaactgttccttttataatactcgacaaaaaattcaattgtcgctcattcgtcataagaataggaggagaatcaacaccgagatctgtaggtaagtaagtgaattcaacatcaaccatagtaagttctgttctgtagtcttctaagaccatcatctttaggtcttgaagagttgttgtagattgcaagatgagtaatctcgcatatttttcttcatcaacaataactttccactctttattagcaaaagatcttcatataccacaagtaacgtaaatctgcaacatgtttgaaagaagaatgatagaaaaaaaaaagagtcgaaggaagaagaaaaaggagaaaacaattagaagaacatataagtgtaatctaattcacttaggtataaagaggagaattatagactaattagaatacaagttctcaaaaattaagacgcaatcttaacttctatatttaatttgatcacacataattatatcatattgctaaaatatttgattaccttattttaagatttatttattttttttttaaaatacattataaattacatagaatttgttttctattttctgtagaatataaaagaaaaaaataagaatgtgtttgctaacaattttagaacatgagtaaatgttagaaaataaattctaattttcctagatgaaagaacaaagtatagaatatgtattctaaattttgtagaagttagcattctaaatactgtagaacataaacgcattctaaatttaatagaacttgtgaagttaataaaatacaatatcaaaattttatagaacttttacagtttatagaatacgatatctaaattttatagaacatgtgtaatgtatagaatatgcattccaaatttagaaggggtattctaaacttcgtagaccatattttactcatctaaaacgacaacaaaaatgatatattttcaacattaaaagtatcctcatgacttctttatcatttggctacaaattgttttgaattttatttgaaaattggttaaacaaattacaaaggctagattaggaatttgtgacatttgaatataaaaggtatagatggacaatatttttattatttttctctttttccaatttttcctaaagattataaattataaaaaacattcctttgaaacaagaccaatcatgataatattgaaaccaaaattttaggaaatttttcctaacaattaattttggacttcgttatatgcctatttcgtatttatctccttcctaattgtattaacagaaacagtgcatttgaataataaaaattaacttatttctcctcatatatgagctacgagatttaccattcttttatttcatttaatataaccctgtaccaaaatgcaaacaattgtgttattgtattatgataaaaaaatccttttattttatatatctttggtttatatggcctaatagtattagatggccaaaaatgatcttgaccattcaaatgcattgttatgagccgttgattagatggcataaaataagtgtctaatatatatttatattttattatagattaatatagtcttatttactttatcttattacatagagtttaaatttaattagatattgactcacgcattaatatctataattccatagattttggcaactgaaaatattttgaatcaatagaaaatattctaacacgctatactttggaaaataacaaaacgtcatcacttttttttaactcacaataaatcctattggtttgaaacgattcgtatttcctttgcgacatcaactgtcaatcattgtattttttgagaaatcttccgtgttatatataaaactaattacactaaaaaaattcattaatctaaatgcttatctttcaaaacaaaaaaaaacttccttttgaaagatatggagcctatccacaagctcactgatttgaatgtaaacttgaccgaatggaaggtttatgtgaagatcctatctatctggaatcatcctccaaagaatcatggtgaagttacaaccatgattttggttgattaaaaggtttggatccttttattttttggttcatttatcaaattttctttgttacgattgaaatagaggcttttttcttctttaaaagagagttttttcttttctttttacctgggtactcgaatagatgcaaccataccttaaaaaaactataaatatcctttctgacccattctcaagtcggacatctgctttcatctttctgattttcgagtcatttatccaacaaacagagttaattattctttgtttcatgtccaaatcaagtttatttggggaacaagtgtttagcctgttctagtaattaagaaaagtaatttctttgatttcatttttcccatagacattaagtatccttcgtcttaggaagttgagtatgtcactggtaagtgtatagagaatttaagttgttatcatttaaatctgcttatatttgttagtatgtgatgcatttaatttttatataatctattaacatcttctgttccacttagacgctatgggtgtggtgtcaaatatctctgctattaagaattttccatttgttggtcatcagggtgagactgactataagtacatgtatgtctctttcgacattgtggacactatgtaagttgttgtatttataggtgtataaagaattctgctgttttatgaatatgaaacttagaagaaataagtattgcagattgaatcatattgtttagggacagaaaatcaagtgctttcttgtggaaaaatgttgtgaactgtttgttataaagtggactaaacgtattgttcagtttcatatagcaataaaccaattcttgcaattgtccgcttctagagaaacacagaggttgagggttactgttctatcacctcttggtaaattcttattgtttgtcaaaagtattgtaattatatatatttcattgttttttttttatctaacttatatcattattttgtaacaggtgagaatgtcttaataagtgaattttgttgttcacatctgtacatcgatccaaccttccctgagatagatctcccaaaatacatgtaaatccataaacattttgtattttttctgcagtaaccaaaacattaatgactaactataagttctgaattttgtgtgtttccagccgcaatatcaaaggtgagaatgatgctctagagaacgtaaagccgatccgtgaattttaaaattacgtgatgaacttatttctattttatttatacttttttatatttcgggttgttttattttgaactatgcttagtatttgaacttacaatatttctaaaactttattacatctacgatacttcttttaatttttatattttataatgtttctttaatatatatattgttttcgaattatcaatgtttgtttttctgaagatgatagcttgaagcacaagttaatcttaagtgtcaaactcacaaaagttgaagactaaccaaaggtgatataaatcaaaccttggttgagttacttttgggaccacactcatggagaaacgggtatgaaagaaattgcttggaagtagcctcattttagccataaggacattttgtctggttgtgctcaaaatctttgcggtttgcttttgcacaaggaatccctagttagctgtggatatatataggtgcttgtgttcattgagagacgccaagggagcataaagagagtgatattacaatgtagatctaagaagaagagttagtaaggtgtagagatgagagaaaacatgtattagtataagcttgttttgttgttctctgagtgatacatgaagtattacagagtgagtctaagtactagtggagggtattagcgggtcacttgtagcttcttgttttgtaaacaccttcttcttcatagtggagttggggatctgttgatcccgaccggatgtagtggctcgttaacgccatgaaccgggttaataaatcctttgtgagctcctcttcttccttcatcttgctctgttttatatttctcttcttctccatattttacttgatatgtttccgctttcttgtgttgatgacaaatgagacaaagcttgaacccttgagaggtgcaaaatcataacagtttcaattatatattgtgtgggttaaatggattttcaaacaatatctaacagattagattcgaatatgaaacttttttagaaacctccctgacgctattatcgagaacgctatattccatctcctctccgacgccggtggagctgaagctcgccggcgtcagaatctctctctcatttctcaagttgtttcctttatcttcaagctaaattttcgcttcgatttaattttcctcttttgcaatccctttaatccaaacctatcgaacctttctctactgttgaatcccctctttgcagcagtgcgttccgacatagttagacagtggcctctgagccatctacactctctgccaacactttgcgaatcaaagacaacagtgactgaatctttcgactccacttgcgttcaacttttctattttgagatttgtctccatcgccatatcgtccctagatccacgggccctctttgctcccaaggttttctccatcgatctgttgcaaaactttcagccgtggtttcatcctccgcgtcggatccgccatacagttttctcaccctgactcttgctttatcgaagatgtctgctccaacgacgcggtccgtacccctccaccgtagccgccgcgcctccaacgcttcttgcccagcaatctggtttctagggtttgcctttatgggccctataaccattgttggcccatttcccctgcggcccaagcccatattttgcgacccaagtcctttaccaattaagcccaggtttgtttctttctgcaatttgcagagtctgtcccaatgtaggcgtcgtttctctgttttgagtggccatggacaccatttgaatggcgaatcaccctcattgctatgctcctgcaaacagtctctaagaaccttggtgctaggtttatgtagggctatgctttatgtttgctttttgaagtctcttggtctagttttgatgcgtccaatctgtcggagatgtgacgctggtcaccaaagccctctatcaaagtacttcatgccgacatctatatcgaccaacttcaagaacatcccaaccatctttccttcccgagtttggatcaagcttcccgactacaagctttgtgtggaattccttaatctccttggccgctatggacttcttgtgagagaggacccacctgttttgttacggtatcgcatcaatctatctacgcctcgacgatcattctctctctaccaaaaccttgtccgaacctttgccaaagctctacttagtgtagtacttctcgtcccgacgagactcttgtctttggcgcccttgttaacgttactacgtcttgtgacagtaaccactttctctctcgctgctttgttcgtggaagtattgtcaacaatcctcgaccttacaagtaccaaattgcctccgtgtgtttggttcatagctctcttggaatttttgttgatatattttatttgtgtgtttgcttttcttcttatggtattggcgaatgcctacttttgttatcttttaaactttgggatcttagaatcctctttccattgtacttgtttctatcttagttgtatgaaaacaagcatttgtccaaaaaaaaaacaaagattcgattatgaatcccttaaaaggtaaacttaaacaatcattatgatcttgagaaaaaaagcaattgattgctaaagattttaaattataaaataatcacttagaaacaagaccaatcatgataatcttgaaaacaaacaaaaaattaatatacctctgtcaaagtatcattcataggtcatattcaattttcgaaaatttcaaatttgatatagctcaaattatccttaagcttattccctcaaataagagatcgtcgttagcactgaatgatcgaatttcactaagctctcgttgttcacacaataaacttatgatgattaatattaagctagacaaagtagatgaaagtaaaagacaagaaaacagtaaatcgagttgtgagttcaggagattaaagcgtgaggtctagggatagtcttaggaaatagataaattgtagatcttgctatgactaggattgttatcaaactgttcttaaactcaaacactattacagagtaacttgtggttcgctatattactcattatgtccaaggctaaagattccttgtgttggcttggcaaatccctaatttaagacatgcatgctaacgagttttataacttcaacttagtaaacatgtcgattcttattacacacctataaacccggctcatctataatagttctgatgacagatacttttttgggcatacctattatctaagatcaaattctaggtgatcaatctagaactagcagtaagaacaattatagatgaagaactctaaaaataatcctaacaggttatcgatttactaatcaatctaaatccctagtgagacaccctaaacccaacaaagtgactacttagacatgatcaaagaatcacaaatcttgatttgaataaattgcattgaattataatatgaaatagagtaaaaggatttcagaatgttctctaaatggatatgattcttctctccaaaagtatgtctcttacacaaaactttcttaggtctaaacaatgaccttaaatatatatatatatatatatatatatatatatacgttactaaaaacgtgcatggtctattttgcaaataagaaaaacttatgggacttctttaagacttggtaaaacgtggggattttctttgtcgaataaggttgtcgatcgacaccatcgcatgaataacgtttttgctggtcttctttgctgaaaagcttccaaagttccttattatgctccatagctctcaaaagtatatatgcacctctaatgactacaaaacatacgaaaatcactagaaagactctcaaaactatcccaaaactatgttagaaatcagtaaaaacccatgatatatcaactctctcagacttagcttttgcttgccctcaagcgaaacaataaacttaacctgtgggaggggtttgaaaacgtagaaactcctgatctttctagcatattaccttgatcattcaaaccaaatccatgcacttaacagttctaatcaagtcctaaccaccatgtaattctctgcacgcttacacaacatcctaaatttcataccaaattccacaattatatctattaggctttcgtcgctgggtctcatcaatcaagttaggattcaagaaccttctacacgcattcatgtactaaacacattttcaatagttttaaaattgatgtatcaatagttttaatagttttaatgatatatcaacagttttaaaattgttagagatataaacacattttcaaaacaaataccagtggcataacgcagacttttacctaatctctttttaaaagaactgtttattttggcataagtaagaaaagtagggatgtttcacatattcgattgtaagtgtgaagattctcaatctttacaattttgacaatatgaaggatggcaaaaaaaaaacatgattctcgtggatacaatggttatttgttttttttggttttgttttatattatctttttctgtattttacaacttcaacaagtttagagatattaaagaaggtgaatggtagttcataaaatattttctggtcatcactctccaagctttagaacatataattataactcatttaatattaagtttgctcatcttaccaaatggcaaaaactgatgaaaagttggctttagtttttctgctttggaaaattttaaaaatgcaaacgggaaatgtaaatcagattcgtgcttttggtaggtttcttttcttttatatgatatagttaattctttgtttttatttagatttgaattttataacatttattgtatattaatatagttctaatatgggtcagttaaatatatatacttctacggggatttatttaaggatgtgtacatgtaaaaccaaaaattaggtgaaagaaaacatgcaaaataaatatgccagatttggccctatagctaatgatacgcgtagtgtaagctacgagattttcgcatatcccgcatttaatgagacgacaaaaactgcaagaaaatacgccgccgagacttaaagagagagagaattgtaatgatgatgagagatataattcagtttgcgtgtttgtgtatttattacgcccctatctatgttgcttcaccaaaagaactgtaaacacctaacttcaaatatctgcatttactaaggcgacgataacaagatcagagtaattgaaggctcaggtacgaatttaattctcaagttactttgttcatcatgtgtatatgagtaaaaagtgagcgctaagtaagggttttaaaactttgtctcatacgaccgctaactttgcaattatgggtgattatcgacaggtgcaatggcgatggttgttcggctggttcgaggagaatggaaaagagatgagtacgggtgctatgaacacgtagcagaactagatgggttatgcttggcggtaaaactccgggaaagggacacgttcgctaaagttgttaccgtcgtgaaggagagactgtcactcgggtcggaggatgaagtggagttgtcttaccaatggctgcagtggatgatgggaccagatttggcagagggcaaacccaatacctattctcgatgatgaggatatgactttgtttatggcgatccgatctgatctagaggaggttcacctgaaggtgaagatcatacggaaaatgttgggagcatcaaccgtaaattcccaccgaagcgtcttagatatggggaatatgacctcggaaacgatatccgataagtattggaatagcagtgaaacacgagcagcttgggattccgcagtaacgagaatgttgtatggtatcgtctctggtaatagtgtaaccggtgatgtcggtctagccaaatacggtgcaggaccccatatagtcaggggagggggtataactatcagagaaaacacgggagagactggtgttggaagcgtcgcaccaagaacgctaacctaaggccatccaactgcaaccgctaaagggaaagaacgtgtcttggacgaagagagcatcaatgacttggagttcgcagtttggaggaagaaccaacaggaagtgatgctgcgagagatggaggagagagaaatacgactggtaagctctacggtaggacagctcgtcacgactccagctaaagctacggataacgatgttagagggcaaacaagttcaaacccggaggaagccattcgtcttacacttggcaacgcggctccagttgctgacgtggtatccgtagtggctctatcttcaacagactcgacattcaagacaccggctaagagtataagcttctctagtgaggatctaatggacgaagacgaagtatctagtaacaattgtctggcaaggataggtatgttagcaaatacagttagtcttatccaaataacattcatgttgacttgtaactaaccgcaggatctgataaagtttttcttacccatatacaaaggcgaagacgaggtggcgcactactactcagaccccgacggaccgctgtgtatggcaccaatgaacacccccaaaatgagtagagtcaacaacattgttaggggggagattgttgcaactgaggcacaagttaatgagttaaatacccatgttcgccggaggttggcagatattgaaagaaacaccagtgccaacagttttgtatgatagggacgccccaccatatttcgacgaccctggagaagaaggtaacacatgttaggatattatatttattagcatctatatgttagagtatctgataattgtggattaaaatattatcctataagtcaggtatttatccggtaaacattaacatatctctatctctgtaaatttcagattatttgcatcgagctctaaaggacgcagactatgaaggggacaatatcttcatcggaagattgttcaagaacaaagaagattgtgcaacaaaactagctattcatgcgattaggcgaaagtttaacttcattactgccaaatcttgccccaacattgtactcgcggtgtgtgtgagtcatacatgtccgtggcgggtttatgcgaccaaactggaggacagtgagaggttcgagataaagtgtgcaacccagcaacacacctgcagcgtagacgctagaggagatttccacaaacaagcgtctacagcagtgatagggcaactcatgagaacaaagtaccttggtgttggaaaagggccacggtcgaatgagttaagaaagatgttaagggatgagtttagccttaacgtctcgtattggaaggcatggagggcaagggaaatatcaatggataacgcaatggggtcggcgatgggcagttacgctttagtccaaccttatttcaagctccttatggaaacaaaccctaactctcttgttgccatggatacggagaaagataagaaaggactggaacgattcaggtacttgttttttgcactggacgcagctgtaaaaggatatgcttatatgaggaaggtgatagtcattgatggaacgcatctgaggggtagatacgggggctgcttaatagctgcaagcgctcaagatgccaatttccaagtcttccccattgcttttgggatagtgaacagcgagaatgacgatgcgtggacatggttcatggagaggctcacggacgccataccaaatgatccggatttggtgttcgtttcagacaggcactcatcgatatatgcaagcatgcggaaggtaagttatttactgataacggataatattaatattacagcgatatgaatatagttatttttataggaatatataaccccactattatgcagtatttatcaatcgttaacaatagggttaaatgatatataaattttactgttacctgttaactaaggagttatccatacttaaaagtctgtggaatttccctagtcatattgatagtgtgatcttacaggataacttatattttattttgacaacggttgtaaatagtgtcgctaaaataacgcagcagtgttagctgagacgttttctattagttgctaacagaatattcgaacgtcagtttctttatagtttgtgttttatccatggagtatgttttatcaataacactgatacattggctctaatttctaggtttatccgatgtcatcgcacgcggcatgcgtggtgcatctaaaaagaaacattgtctcgatattcaagtcggaagggttgagctttctcgtggctagtgcggcccgatcttaccgtccaagcgacttcaatcgcatcttcgccgaggtaagggctatgcacccagcttgtgctgattacctcgaaggcattggttttgagcattggacgcggtcgcattttgtgggagataggtattttttcatgacaagcaacatagctgagtcgctaaacaatgtcttaaccatggcaagggattatccggtaatttctctcttagagaccctgcgaaccacactggttacgtggtttgccctacggcaagaaactgcacaacacgagggaaatcttttgctccccaaggtcaatgagatggtcattgaaaattttgaaaaagaggcagggtttgttgtgcttaaaataggagatgcattttaggaggtgcgagacaaggaagattcggcgttcgcggttaatctttgggaaaggtcatgcacatgcagggaattccagctgctaactattccttgttcccatgccatagcagcgacaataaaagaagggatccgtgtcgaaacaatggtcggcgtccaccacaccatcccatatctgaaattagcgtacaaggggatgatcatgcccgtcccggacatggatacactggcaccttccctagtgatgtcggaagcggaaagcttgcgccaccttacgttcgtaggccaccgggaaggccgcgtaagaggagactattctctaggggagagtttaaggtaacattgttagtaacggatatataaacagatagatatatcgctaatgtgtgtgttatttatctgcagaaaaaatcctcaaagcgttgctccagatgcaggacagtgggacataatagggcaacgtgcaagggaccggtttcggtaacaatcattttactatttattattacagaattaacggtaacattagagttaccaactcatgcatttacgtgcaggatccataactgcgagcgtggggttgttttttgggggaaggaaaatgttttttgaaaaagaggaggtttgaaaggatggtgccatgaaagttggaaactaagaatgtgtgataaataatgcagaaggatcaggagattttccctgtatatacatacggaatttgatccttagaatgtaatattactatcgggggcgatccccatcaaacctcctctatgcatgtgatatattatgataaactttctgttaactgctataatgttgtttggtacttttgatgacgatgttcaagcatgtatcaatataaaatatttaaaactgtgttagagaatatagaacaactgtgttaggttttatggaaaatggaaaactatattgttaacgataatgtttacggagacagctatgaataaaattttaaaacgataacacatctacaatatcagttaataggtgggatagctgatatggaacattttaaaattgttataatgagttaactaaagtaaaactaatattaacggcaacaaaaaaaagttacaagttaccgataaattctcaaaattaataagactctgaatgaacgaaagtcaaagaatgatacacaataagttacaagttatctggatatgatatgggttaataaggacagtttaaaacgggttaccacacaatgttaatagatgcaaaacgagaataatgtaaccctaaaagggttaaaatttgttatatcagaatgggtagaaataatatattggttaagagatacataaacacttaccccatatttaaattggtaatggataatttatacacaaagatttatatcacaagaagagacccatagtacagcgttggttatgtaaacaatattgggtaagaataatattatcgaatagttaatagtatatggttaacaggtaagtttaaaaactacccactaatatgagaccactaaataagctaacaaataaattagcaactaaataatattcaagttgcgaataatatattggttaagggatacattaatacttaccccatatttaactttgtaatggataatttatacacaaagatttatatcacaagaagagacccattgtacagcgttggttatgtatacaatattgggtaagaataatattatcgaatatttaatagtatatgggttaacaggtaagtttaaaactacccactaatattagaccactaaataagcaaacaaaataattagcaactaaataatattcaactaagtaatgagattaccaactttaaagaatgtataaatctaatgttatcagaaagcgtagaaataatatataggttaagggatacattaacagttacccaaaatttaattttggaatggataatttatagacaaagatttatatcacaagaagagaactattgtacagcgttggttatgtaaacaatattgggtaagaataatattatcgaatagttaaaattatatgggttaacaagaaagtataaaaactacccactaatatgagaccactaaataagctaacaaaaatattagcaaataaataatattcaagttccgtaatgagattaccaactttaaagaatgtataaatctaatgttattagaaagcttagaaataatatatgggttaagagatacattaacacttacccaatatttaattttaaaaagtataatttacacagaaagatttatatcacaagaagagacctattgtacagcgttgtttaaggaaagtttaaaaacgcgtgagctcacaatgatataattttagagatagggtctaataattataacccgtatgtgataactagatgattacgtgctcataccattatccaagtgttcgggttggaaaactaaaacaatgtaaacctataaagccataaacacaacgtcagtttttgaaaaagaatggataattattaagttatgatgtaatccatccggttacattgacaatttcattgctaacatagttagacacaaacagtgtctttagaaatattatttacatagtgaaagtgttataatgttacaccataacccgaataagaacgaatactcgaagttttacgctataacgatgaaacatattgacctaggagataagatatacgttataacagagttaccgttaagtgataatagttagttgataaatatagctaccaaaaagttaccgtccaaagagcagagataggtgataaatatagcgagttatagagtaacaaagctttgaaaacgatagcgaaagcaaatagtcaaagctaaagcaaagccgataaataagttcaaacatgtgtactacacgcaaaaggaagggaggcaatgtctttaaggccaatagtcggctaataaaaatattaggaggcaacacccgacaatattattgtcgagacaagttttttaacttctacatccagcgcaacaacgtcaaactccatgcattcctcgacccctccgacagcatgggcgtggatgaggaaaaccgatagaacaccggaatcgaacggggaggaaacttgcgggataccatgcgggcgatcaagcagaaagggttgcagcgagatgtccccgctagaagagctagtctgtcggaaaaggtaagggagcatggcagccagcggctggagttcggcatataacgctgcatcacgtcgtagctgaatgttggaatcgaggatggtaatcttatgtgcctttaggtccacacacagcgacacccaatgttttttgtcgaagttgaaaggcatatacacacaatcagcctcagcaaacaaacgaacacggttggactcaccagcaccaattagtagatcaactaaagcagatggaaaaatgaaatctttgggcggcaaagttttagcaaacttcggaaagagcctcgtcagctgtgaaacgaatttcgagccaagcacatcaaccctgagcttctcgccatcaatgtcgtctgtccgtaagagatgtctgctgaatttgatcaaaacgtccatgactttgctagagaagtgtttcttccgctcaatgatgtcgaaaatctctttgtgggaaagagaagctt

SEQ ID NO: 186 - DNA, 95959 bp, Arabidopsis thaliana
aagctttgaaaacgatagcgaaagcaaatagtcaaagctaaagcaaagccgataaataagttcaaacatgtgtactacacgcaaaaggaagggaggcaatgtctttaaggccaatagtcggctaataaaaatattaggaggcaacacccgacaatattattgtcgagacaagttttttaacttctacatccagcgcaacaacgtcaaactccatgcattcctcgacccctccgacagcatgggcgtggatgaggaaaaccgatagaacaccggaatcgaacggggaggaaacttgcgggataccatgcgggcgatcaagcagaaagggttgcagcgagatgtccccgctagaagagctagtctgtcggaaaaggtaagggagcatggcagccagcggctggagttcggcatataacgctgcatcacgtcgtagctgaatgttggaatcgaggatggtaatcttatgtgcctttaggtccacacacagcgacacccaatgttttttgtcgaagttgaaaggcatatacacacaatcagcctcagcaaacaaacgaacacggttggactcaccagcaccaattagtagatcaactaaagcagatggaaaaatgaaatctttgggcggcaaagttttagcaaacttcggaaagagcctcgtcagctgtgaaacgaatttcgagccaagcacatcaaccctgagcttctcgccatcaatgtcgtctgtccgtaagagatgtctgctgaatttgatcaaaacgtccatgactttgctagagaagtgtttcttccgctcaatgatgtcgaaaatctctttgtgggaaagagaagcttcaccaacaatgctaatcgagctgcaaaatcaattgagagaagttataattctagtgtaatatgataaattagttaaccggtaattgcattacctttttccctttatcttcgagagagatcgttggtaacgcacttctggatcagatgccaactccccgacgcttagaaatggggatgggtgacccaccagtaacttagttttcttgtcgaagtgaaaccgcccatctaacttactagaaagcgtccttggtcttttgctcttccttccttgattgacatcgccatcgggaccgccgccatctttcccagccaatagtttaccgccggaaggcggaggggggttgaaaaatcctaatgaaaagataaagcaaaataaggagtggggggggggggaaagaaaaaaattaaaaaggaggaaacttcggattacctcatctgaatcctgataagggttgccaatcgtcatcagatttaagagagatacagtgtgagtagataataaagtttatagtggataacattaaagttagtaacgttggacaatagttaccggcagattaggaatcaaagaagctcctacggaagaaacattatcaacctgtattaaaaaaaattacacaacggtcttagatattttacacggtaaggatctccttacccggaatttgtactattagctaataatgatgttaaatatcaagtctaacataaaaaagtgcctaccttcggggtgtcattgagtttagttatcggagatgaagccgtctaggaaaaaaggaaactaaattagcatcaataggtacaatcaatttaaagtaaaacgccataatagtgattttagtatgtaacactgaaattagcttcataagtaaaaatgggtggggtggggaaaaaatcataacctttaatgcctgggtcgggagagcgctgggatgggttggttgagatgaaccaatctgtgaagagaacatcgcaaaatcctgggattcctaaaaaaataccgtatacatacacaattggtggataaggaagaatttatcaattaaatataagatatttaaaaatcctccatctacctcaggagggttgggtgcaacaactgatgtagcgacaacaacgacagatggtaggggatccaacggagcgacggggtttaatggatcaggggcaacatcgggtccgagagcagtattctgaattgaatacaaacacgacacaataactggtgatgaattataaatatttaaaaacataagtctggatacaattagcattagcaaactaacctctgttgtaacagacttcggagggctaactgtggaggaactggggtgggccacaccatcagacggcatgttgacatcctggacaaaatatacattagtgaacagccatgcgtaatgtcgaaaaaaggtcataaaaagaaataaaattgttatcggatacctattgtattatacgacaacagcttagttacaaacaatgtaatcgaacttagggaataactatatagtgcacgacaagcatgtacttgttcagccattgccgcattaatatcatcgaccatctcaacgtcggcctacaaagccaaaacatgttaaaaacgttaagtagttaataacttaattaccagatacatttataattgccgcggtctacaggttatagtgtaacaattatatcgaaaatggaattaaataaacaaattgttaacggataaaaagtttattttacgttaatagaattattacaattgttctaagcgacttagtgactaactttaaagtacaaaaaaagcatttacctggtgagccctgcctgcgttaagatcatcgaccatatcaacgtcggcctacatagcaacagtaaattgataaaaaagttaataaactataaactaaagtaccagatacataaataattagcgcactataaacgttagtctataacaaatatacctgttggttcccatttttttccggctgaacaccaacttcttcctcgcccgactgatatcgtgaataataagagaaacaggacaatttaaacaacttcgttacctcccctattctcgctaagacaaataataacgaggtaaggtcgttactcgctaacctgcactttgttcgtcttattcgtattggaggcgccgccagacggatcagtcggaacattaaccgagttgtagaaagaaacaacatcatctactgctgatattgcttggtcaccctggaaagatggaagggtaaaatcagtttgcatggatgagggttgcctcggcggagggatggggttaaaatccgactcctcgtattcgttggcagactccggagatgaaacaggattggagttttgctcttctccgccagtttccttgtcagcttgaagaccgttatcccccaacgcaacttccttgtcagtatgaggaccgtgatctccgtctgcggcttctttgtcagcttaagaaccgggttccccagaaggaggacctttcggattatcgggatcaacaaccaaattttcagtaaaccagtgaatcacgcctttgagaatcttctcagattgcgccttcaatttttcatcaatcatacgagacaaagcatcaaaatataccccgctagagctttcgcctttctccccgatgggaccatgattctttctcctcatgccagtggctggtctcgcattggattgggctttcattccacgaactaccttggttttcccacctgtcttttatttttttgacgcaacaactatatcggtcggaatacaaccgccacaaaacatttcattagaaaacgacttgccttcctttgccatcttcaccatgttgtcaaccctttcaccgtcttcatcatctgaccatgttagatcttcaacgggattcaatcgagcattggggaagatgattggttctacatgagcctgcaggaaaattaagtaacgtattatatagcaccgtaatagtatatttataacagtaaaagagttatcgaagaaacaaaattattatgggataaaagagattgaattaaaaaaacccatccatctatccaattaatagtagggtccttaacagtatcgttagcatgtaaaacaaagagtttgatagacaataatgatggtaacgttatcatggtaacagagttattttcaatgaaaaattactagttgataacgaaaaaattggagtaaagaaatcaagaaattcgccacttaagacactaacaaagaagttaatgtgtatcaaacatgttatcgtatatgtatcattagcacgtaaacaaaaagtttgatagacaacaataatggtaacattatcatggtaacagagttattttcgaagaaaatttactagttgataactaaaaaattggagtaaagaaatcaagaaattcgccacttaagacactaacaaagaagttaatgtgtaacaaacatcttatcgtatatgtattgggagaaaacattacctcgcaattagaatcgacattttttgcattcccaagcttgagggcaacgcctggccgagtagccacatcagcggctgcttccgcatcagaatcagacaaaacaacctcatcaatttgtggaccctcctgtatggctgggactgcttccaaaacaacaagctgcaaagcgtatagaagaccttgtaccgcaacacacgttgtggcgagctgttcaacttccctctcttttattgaggtcatcatcatctcgaaagacaatcgaccccaagggtaagacaaaaaaccctgcagatcctcggacatttccgcgtgatctttaattattttagggtaatgcgatgtgggcaacaaaaacccatcaacaagagccaaacaagcataacgcagccttatttcgcgatcggtaacaacccttttcttaagcatcgcaataaccctttcaactgtgacatcttcttctagaccgaacagggtactgtaataggggatttgcttcccccgtccctctcttcttcttcttctgaactttaggatatttgccacacggaagcccggtaacaatcttaaactcccttaacgaaaatcttaccggagtcccagcgaacactacccaaatctcgtgggggttgaaatttccaattgcctactcagtaataagagtctgaaactcgccgagaacgccggtttattcggaaaatctaaaagcccacccaatgaattgttgaggatgaaggattactcttgttcgtcgatagcgttaataatcccagacagtgtttttattttgtggtacacgtttaccctttcgccaagcggctcctccccaaatgcaatcaaccggttgggtaattcgacagactccatctagaacaaaaaaaaaattgattaaactagaaccgccatgtgaaagaaccctaaccggagccgaattagaattcaaacattaccttagaaatagaaacgcagcgccgaagagtttactccggagaagactaattatcacgggctccgccgaggatgatgtttggatatcggaccaaaaaagatgcaactcaatgagactttaaacgaacgctctcaagagttgtggtgactctcagatttttgggagaataaaaacactagtaaatataagatccattgagacgcgactcttcatttttagcagataaagttcctcgcaagcctttattaaatgaacagtgttcaacaaacaaaatctctcgaaagattacgttgccgtctgacacaatactagtctagcggtaatgttcattttcgaaatgatttataggggtataggggtcattatacacatcaacaatcattgggaacagttgaaaaatggacgacctaattaccgagtcttccatgtacatataatggtaataccattctaataatgtctatgacattagatgtttgtgatgtggtggagttgtaaatgtgtcaaaagttcaacaaatgccatttttttgtctaatagctttgaagtacatcttcgtaactagtttttatttaggaaaagtgactacgagttaccctctcaaaatattacttttatttctatttttagttgttcgattcatagtaataattttccaagtgtccaatattctactataattaatttttgatattttgagtttgtttggctacgaaacaaagaattgacttgagtaaaaaacaactaaagtgatgtgtcgaatttcagaatttaataatataaaattttggtcaacgcggtttatccttcttcgaggatcgttttattggtccctcgaacaaaataaataatagagacgattttaagtggataacactctaaatttttgggggattgacatgaatgacactaaaaaattttattattttaaaaataataatttcttttcaaacttccaaaaatagcatataaaatttttaattctctataaatttattaaataataaagtttttttattaccatttgtatcaatctcccaaataaaaatgcgagcaaacactaatctaatattaaattgaatcaaaaacttttaaatagtaaaaatatataccctaaattagaaataaaaaatgtaatattacaaacaaattttaaaataaaaaatctcttttaaatggtgaaaatatataccttaaattttttttggtagaaaaatatataccttaaattggaaataggaaactcaaatataataccataaactaatattaaaagaaaaattctttctaatgcccttttcatgatgtcctttttcaactctacccttttgttttatccattttcatttctaccctctttaattttttaatgaccattttacccatatttagaaattattttaggttaacaaaatgaaatattaatgttttttcgcctaaaatattccaaaacaatcccgccaaaagtttcccgccaaaattaatttttcaaaaaaagaattctcgcaaaaaacattacaaggaattttaaaaggaagattaacaagtgattttaaaaggtttttaaaagatttacaagagattttaaaagggttataaaagatttacaagggattttaaaatggttttaaaagatttacaagggattttaaaagtgttttgaaagatttaaaagagattttaaaagagttttaaaagatttacaagatttttttaaagggtttaattggagtttaaaggatgtacaaggattttaaaaagatttttgaaaaattaacaaaagaccctttaaaaactcttgtaaatctttttaaaaccttttaaaatcccttgtaagtcttttaaaactattttaaaatcccttgtaaatcttttataacccttttaaaatcccttgtaaatctatttcccgccaaaaaaaatttacaagaatttttaacagcattgttttggctgaaaaaaaaattgttacgaaaaaaaatttggcggaattttttttttggcgtgaaaaataaattttgtcgccaaaaatttggcgaaaaattttcagtttccaattacatgttccaattagatgagggtaatttggtcattttgttcaagagaagagatatttttaaaaatgaacaacataaaagggtattgttggaaaagggtagtaaaaaaagggtagttttgcaaatctcccatattaaaatgaatcaaaatttattttaaatagttaaaatgtataccctaaattagaaatagataacccaaatataatatttttaatttatttctaatttattttggttgaatagattttatataaaactgtggtattattatgaataattcactctaatgcccttttctcaatgcccttttgcaactctaccctttttttcccattttcatttctaccctttctaatacttttctccccaaattacccttaatgagctacccacagacctaattcatttcttcactctctctcttcttcctccatcggaaattgtgaatgtcgttgaatcccatgccgtcggaaatagtgagtttactcgccgtgaaaacccatcttcgccgtcgtaagtagagctgtgtgtcgtcgtcgaatctcttgcgtttcccaggtttgattttataatgttagcttaaatcttcgttttcgaattggtttattcgatttttgttgttgattatgtgaattcgttattttaaattctgattcaatcgacagtttgacatttgcttcagcttcgaatttgaattttgtttgagatttgatgattgaatttgtttctaaaatccttgtaaattcgttatactgttctaaaatccttttgaattcgttagactgtttcgtgatagatttgcttatgtgaattcgttatactatttcgtaatagattttggttctgatttagtgtttacctcttttgcatatgctttcgtgatagatctatgccacttacgctttaaaacgatttgtaaaccatgttaactacttttcaaagcttttaaaatcccttgtaaattattttatgctacttacttacgctttaaaacgatttgtaaaccatgttaaccacttttcaaagcttttaaaatcccttgtaaattattctatgttacttacttacgctttaaaccgatttgtaaaccatgttaaccacttttcaaagcttttaaaatcccttgtaaattattctatgctacttacttacgctttaaaacgatttgtaaaccatgttaaccacttttcaaagcttttaaaatcccttgtaaattattctatgctacttacttacgctttaaaacgatttgtaaaccatgttaaccacttttcaaagcttttaaaatcccttgtaaattgttctatgctacttacttacgctttaaaacgatttgtaaaccatgttaaccacttttcaaagcttttaaaatctcttgtaaattattctatgctacttacttacgctttaaaacgatttgtaaaccttgcttttctctgtagtgacagtgtttttgtgggtgttgattttgttgttaattatcttatcaggttataatgctagaattgtattctgtttgtggcttgtggaagttgacaaacaatatgacttgggaatttgaattagacattgaattgggagcttctttagtgctcattgatgagcacattacctatcacgcgttggttgatattcttgtagaggattttcaaatagatagttcaaccaattctttgaagcttagttacaagttagtctccacgtctacaaccatacaatctcatcctctttattttaggaacgatagacagcttgcaacttttatgcacaaattctcacagagtggaggattgcttcagttatgtttgactgtagagcaaatttctgtgacagttgagcaggtttttcaataaccttcttgtgtaataattttaaaaatccttgtaaaatcattattaagtcagtgattgtgcttattacaggctgagactacttcaaatccttttgtttctcattttgtccctactgctcaggtactaatcgttttaaaaatccttgtaaaatcattattaacgtttttaaaccccttttaaaaatccttgtaaaatcattattaacgtttttaaaccccttttaaaaatccttgtaaaatcattattaagtcagtgattgtgtttattacaggctgagacgacttcaaatccttttgcttctcattctgcatttactactcaggtaataatcccttttaaaaatcattattaacgtttttaaaccccttttaaaaatccttgtaaaatcattattaagtcagtgattgtgtttattacaggctgagacgacttcaaatccttttgcttctcattctgcatctactactcaggtaataatcccttgtaaaatcattattaacgtttttaaaccccttttaaaaatccttgtaaaatcattatttaagatagattgatgtttgaggtaaactttttattttggcagccgaggttaacctctaggattattgaggtctgtgtatctgaaacatctagtattcttgatcaacagtattctagttctgcgttttcaactggtctaagtgatgctgattctttgtttattggaaaaattttcaaagacaaagataaaatggtattcacgttgcggatgtttgcagtgaagcacaactttgagtttcatacagtgaaatcagatctcacgaggtatgttcttcattgtattgatgaaaactgtatttggagactacgtgcaactagggctggtggatccgagaggtatgttattcggaagtatgttagtcatcactgttgtgactcttattaaggaatgttagtcatcgtcaagcatctgcaaggacattaggaagattgataagtaaccattttgaaggaggaaagcttcccctcagacctaaatagctgatagaaatatttagaaaagatcatggagttggaatcaattattcgaaggcttggagagttcaagaacatgcagcagaacttgcgaggtgtttacctgatgatagttttgaggttttaccgaggtggttccacagggtacaagtgacgaatccaggttctatcacttttttcaaaaaagattctgctaataagtttaagtatgcgtttctggcttttggtgcatcaattagaggttataagttgatgagaaaagtcatatctattgatggtgcccatctgacatcaaagtttaaagggactttgcttggtgcctcagctcaggatgggaattttaatttgtatcctattgcttttgcaatagttgactctgaaaatgacgcgtcatgggactggtttttgaagtgtttgctgaatataatccctgatgagaatgatttagtttttgtgtctgaccgagctgcttctattgcaagcggactttcagggaattatccacttgctcatcatggactttgcacttttcatttgcaaaaaaacttggaaacccatttcagaggttcttcacttattccagtttactatgcggtttctagagtttacacgaagacagaatttgattctttgttctgggaaatcactaatagtgataaaaagttagcacaatatctttgggaggtagacgttaggaaatggtctcgagcttattctccttcaaatcggtataacatcatgacatctaatctagctgaatctgttaatgccttgttgaaacagaaccgcgagtatccgattgtttgcctatttgagtcaatcagatctattatgacatggtggtttaatgagcgacgtgaagagagtagtcaacatccgtctgctgttactagaaatgtagggaagaaattgaaagcgtcatatgatacttcaacacgatggcttgaggtttgtcaagttaatcaagaagagtttgaggtaaaaggagataccaaaacgcatttggttaatctggacaaaaggacttgcacatgctgtatgtttgatattgataaatttccttgcgcacatggaattacttctgctaaacatatcaatctgaacgaaaacatgtttgttgatgagtttcattctacttacaggttttatctttattcttcacaactttacaagcgtttttaaatgttttaatatctctttttatggttttatctgtgtttatgtggttttaatctcagtttacatcgctgtaatttataggtggcgtcaagcatattcagagagcattcacccaaatggtgatatggaatattgggagattccagaaactattagtgaagttatttgtctaccaccttctactcgtgtacctagtggcagacggaagaaaaagaggataccttctgtttgggagcatggaaggtctcagccaaaaccaaaattacacaaatgcagtaggtgtggtcagtcgggtcacaacaaatcaacttgtgttgctgcaatttagatatatctttatctccagagaattgaatattgttggggtttttaatattttcttcattgtgtcgtgttattactctcgtttgttaaaattactatcaaacttttacaagtaattttgaaggttattccaatattttaccttttaaaatctcttgtaaaatcctatttaaaatgtctgtttaaatccttttaaaataccttgtaaatctttcgttatgccacttacatatactttaaacgattgtaaatcaagttaaacacttttacaagcttttaacttgaatcttttaaaatgtcttgtaagtcgtttactaaaattactatcaaactttacaagtaattttaatagtaattccaataatttacctttttaaatattttgtaaaagcctgtttaaaacgtctttgaaaatccttttaaaataccttgtaaatattttgttatgccacttacatatacttttaacaattgtgaatcaagttaaacacttttacaagcttttaaaatcccttataaatcattttctgacattaacttattcttcttaaaacgattgttaatcaagtaaaccccttttaaaagcttttaaaatcccttgtaaatcatgctttaccactttactatccttaaaaaccgatagcaaaccatgtaaactcttgttaattcgtttgcaaggctttacaaatcctttaaaatgtcatataaatctttcgttatgcatataagctgtttatgcctttaaaatcacttgtaaatcatgataattcttataaaaccataagcagttgaaaatagtaaagcattttgattagatttgacagtcataattaaaatacaagtacaatcatagattccaaataacaaaagtaaaataaacatgtttgaaataagtcagtctaaagaactaaatccatttttgccttagtagctctgtctttctctacctgcaaataaaatttaagctgtaagttattttttgcataacaataatattcaagtttttaaagatatatcgttatacaaaggaagagtttaacactaacaattattatcttgtagatttgttcagctaggtatttcacttctggatgagctcgaggcagtttgtcacgatgaatgagtaacgttgctttctttaatgctaatttgtatttcttctcgtcctacatttcccaaatttcgactttttgccatttactgtcgggccaaagaatctgaaatgtaaaaattccaaaatgataagaattaaaaccttttgcagcaaaacaatgatgtaatttaacttacttcttcaagtgacgatagtagatctcttattaatttgtttttcgcccattttttaacttttaggtcaatttcttccattacttcctgactcaacatgaccggcgtcaaaggagtttgaactgatacaaaaacaaaaaaaatatatttagaagttgtttatcaaggcaatcatctgtgaatgtaaaaagaacttacgactgctctgtccctgggtgatttcttcttcttgcgtagagagtggtgtttgattaacatcttcatcatctttcttggtctcttttggaacctgtaaacaaaaacatccaaacaaatttttattttttgacaattttatcatgccttttaaaacaactaaggaatgcagacctttgttgtttcttctttttgaggttgtgattctttctctgtgggtgcagtcccattaccttcatcatctgacaaaattacatatgcttcttgatcttcagtctcatcatattcatcatgttcttctacgttttcttcttttggaacctgtaaaccaaaacatcaaaacaaatttttattttttgacaattttatcatgtctttttaaacaattaaggaatgcagacctctgttgtttcttctttttgaggttgtgattctttctctgtgggtgcagtcccattatcttcatcatctgacaaaattacatatgcttcttgatcttcagtctcatcatgttcatcatgttcttctacgttttcttcttttggaacctgtaaaccaaaacatcaaaacaaaatttttattttttgacaattttatcatgtctttttaaaaagttaaggaaagcagacatttgtttcttctttttttttgttgtgattctttctctgtgggtgcagtatcattatcttcatcatctgacaaatttatatacgcttcttgatctgcagcatcattatattcatcatgttcttctactttttcttcttttccttcttctctttccatttcttcatcgccttgtttgggattctcttgtttttctgtttcttcaacattgcaagtagaatgatgatctctgtattcaacctgtataaataattacaagttcccaaatacaagccaggacacagttattagtcatgtaaatcacttttaaaaagcttttaaaatccgttgtaaaatcttatcgaacactgcctatcctttaaaaacgaatttcaatcttttaaaaccccattaagaagtctttaaaatcccttgtaaatacatatctaacactgcctatcttttaaaaacggctaaaaatctttcaaacacgatttattcaccttccttaggttttaaaaacaatcgatcttcgagatcaccaagggtataggattctttactagcccaaaagtatggttcttttacaggatctttcccctttcgtcgaagttccctatgaacaggttcacattgaattcctgtatgaacaaaagacagtgtcgagactattattacaggttttatagtaaatactttaaaaacgattgtaaatcatgtttaacacttttaaaagcttttaaaatcccttataaatcattcaatgccacttacttatgctttaaaaacgattgtaaaccatgcagacacttttaaaatcccttgtaaatcattatatgacacttacttatgctttaaaaacgattgtaaatcatgtttaacccttctaaaagcttttaaaatcccttgtaaatcattctattcaacttacttatgcttaaaaaatgattgtaaatcatgtttaacccttagaaaaggttttaaaatctcttgtaaatattctatgccacttacttatgttttaaaatcgattgtaaactatgcaaacacttctaaaatcccttgtaaatcgttttacgacacttacttatgcttttaaaatcccttgtaaacgtgtttaacacttctttaagcttttaaaatcccttgtaaattattctatgctagttacttatgcctaaaaacggttgtaaaccatgcataccctttttaaaatcccttgtaaatcattatctgccactaacttatgcttcttaaacgattgttaatgaagtaaaccccttttaaaagcttttaaaatctcttgtaaattatctgtgacacttatgttttaaaaacgattgtaaactacgcaaacagttatgcaaatgccttgcaaatgccttgtaaatcattctacgacagttaattaagctttaaaaacgattgtaaaactttattacctgttgtgagatagaactctctcaaggagaaacggataggttgagaatcaactctaaaccaaagagttgatccttttgtttttactctctgcttcatgagatagtgaaagattttccagaaaatctgattcccttcttagccttcatttttggtcccaattcaactagaggaccaagaaacactcgcctaaagcttcctctactttactaactaaattccaatccgagtattgttgaacggttcccagtgtaatagattcttcaccttctctgtatatctgttcaggcaatgtaaggatttcactctctgaatccatctgcaaaacatgttatgaaacatcgtcagatctactataaaatcgactataaaatcgattataaaaacggttaccgtcggatctatcgatatctctggggattgtttgcgtcgtagagaaatgatctgaatccttcagcgaagaacaagtttatcggagaggaaattcgtcggcgattttggggtttctcagagagaaatttcgtcggcgattttcagtgaaatcggagaggaaattcgttggcgattttgagtgaaatcggagaggaaattcgccggcgattttgagtgaaatcggagaggaaattcgccggccaaaacgaagaagtttgtgccaaaacgaagaagtttgtgccaaaacgaagaagtttgtgaaacgaatgtgaaacctaatcattcagtaagagtaagacagtcatttgccatattagaaggggtagttttaaaaatggccttcaggaaagggcatttttacaaaaggttattagaataagggcagttttgcaaatatccctattattattgtccataaaacttgtttaatcttacttttaggaatttctcaaataattatttgagtgctatttatgtctaaaaaactttttaatgctatttttgtccaaaaaacttaaaagtgtgctatttgtgggaatttctctaaactttaacatatttttattagtaatataaatttctaaattaattttattaatattttaaatctctaaataaaaattttctgtttatgtggtcttaaaaataacggaacattaacttccgttaacaaaaaccaaaattaactgaaaagtaaaacgaactttttttttttttggaagccctcttgacctagtggttagttaaccagttgttcattaatgcttctacaataagaggtttgagttcgagtcttgctactgcgatttattagcagatttgcagattaatggagacaagtgtgtagaagatctacaacgaagtacaattatagtcgttcgccaagattctacgcagataattgaagatgtccatcaagcgcatggagaaggagaagaatgtgtcgtttgtcatggatctaataagggtcagaaagaattgtccgtggtagaatcgtctatgtaacagttttcaaaatttgtaataaatagtaagtttagacggcaaaaaaaagaacttttttttacgaaatagttttatcttttgacgtaaaatagtatttgtgtatctccttaatcataatatttttacttttgatttagaaaatgatataattttaatttttgatgttaaaaatgatataatttttttttttttaaaatggatgacaaaaaatgatataattttacttttgacgttaaaaaagcgaaaaacaagttttactataaaccttcaaacttattttactaacactcaaacctcaaagtaaattttctgtttggatctttctaaaagataatagagtcatgtcaacagaaaactaaaacgtgtttttttttgtcatccaaaaataaacgagtcattcgtgaagaatattgtttacatatataatataaatcggttgggtacgatcttttcgtgtcaaaatatccgctttaacattagctactaaagattaaagataaagaataccttgtgaactcatcattgtcgctctgtaactcctccaaatacactaagaaagttgttcattcggttggaaaagacaccatctacaccagatttgaacagtctgtaagaacaactacatcttggttgtcggcaccattcatacacttcatcgtacaaagaagagcttccacctctgcatgtagtagtggaaattgatttcctctgagtaaaatgtgttatttttttttctttttaacctcaaaaagtaaatttattttgattgacgaaacaaaaaaactatttaatgtcaaaaagtaaaattaaattatttttaatgttgaattatttcattaaaaaaaatacgtttaaattttttgtcgacgggagttatggttcggttatcttttaggacaaaactaatagaaaacttaatttgaaggtttaaagtgttaataaaacagtttgtaggtttataatactaataaaaatatcaaggtttaaagtattacctaatatcacttataaggttaaaaaaatggttttctcaagattaaaatttgagcagatatgtgtgatatagttgctgggtttattttagagttaatgttctaaagttatatatatatatatatatatatatatatttttggtaaaagattaagttttataccattttagtttttttaacagaattacaaagattacaaggaacagaataaagcaatatacagaagataaatacaacattactactcaaattgcgatagatcgcttctaaatgcaaaaagataggctgcgaggtgaaacaccgattccgagctcgcgaggcttggaaatttgcgtgattgccacaagaccgaagtattggagtcctcatcttagttgccacgagcaaaactatccgaaacatgtccacaaaatctcgagatagaagcttatagtttctccgagaactaacgcaaaaacgcataggcaagcgcggacttctacactaactcaaagaattagtgatgccacttagacttattcgccgcctctattcaacactcaacaaccttgccaatgcaactagaagctcaaaatcgcaaagagaaccgacaccaacaaaacctgaaactacaaaactctaccttaaagtaaccgtagaaatgtgtcggggacgaagaaaaatggagacagagaaaccatatccatggctgaggaacttgccaccttcttcaacccactaaaggaggagagacactgtccaccaacaaccaacccacaatgcctctaaccgccacgatcaagccgaagaaccaaaaaggttctgagacttgcctccaaaagagactctcgccggtttcaaacacactaccaccgcagctggaggaaaaactaaggtaagagagaccgagaagagaaggtctgcttaccaaggctcccgctgatgtagcaaaagagccaaaaacacgaggaacgacgacaagtgaagaaatccggcgatgcaccaccggtttcacagaaatggaggatggtctcgccgttaagagccacgaccctgctacaaacgccggatcaaaaccaaaaccagaaacggagaaccctatacgcacaacgatagatctgatgcccaactcgccggaggttaagccttaaaccagcgccgtccatgagcgtcgaatttcagagttcaccaggaaagcaagcaatctatcccaaactgagcgtggttgacgcagtttcaccaccaacaagaggcaaagagcaattctcggagaggccaccattggagcaacaaaggctagatggagaaggagacaaacagagagaaagggaaaggagagatggcctctccgacaactagcaaaagagcgtcgttgctggagaagcagaatcaaagctcaatttagggtttcacctgctttatcgccttatttgggagttatatatttgatacccgaaattcacatgtcgtctataaccaatctaaaatacgaaatatttgcatgttaggacactttatttaaaattttaatcatttataacacttcccaaaactggcacactttttgatcttattcccatcttttccgcgtttacaattaccgtaacacccttggcggaagttcagtcgtccaaccgaaaaccaaccctaaccggtcctcatcactttactcttttttaccttatccaccatctcttgaacatacccttctcgattcaaattagtgcgcttctggtaaaagccataatccaccatactcggttattttctttcaattcttccgtggtctcccttcatttctgtcaaaaatggccgaaattaccgaagatcctaacatagttccaccagtcgctaccttaacaggtaaataactttaacctagattcgttttgtcactcttctctgtcgttttcatcttctataactaaacaacgttttaaattgttcaggcaaggctgcttttcttgatcccgttttttgggataatgatttgccaccacggttgtacggaaccatacgttacccagacgctcgacttaatgtatattccaagtttgattatctatgtttcattaagaaacatatggaagggacacatgagccttaatgtaaactctggcacttcctcttacagacccttcggacgatatagttatattagactgggataatgtgtggattcctcgtcaatcccgtctcctagctgatgttcatgctgttgaacaagatcgtgatgtatgattcaattttttttgttttccccattttgtagcttcccactttcttcattcatttctatgtaattgcaggtaactgaggagtctctaatcgaaatggggaacgccagtttgtatgagtaggatgatgaagttagggacaagaaggtgtcctatatgttagagaagattcaatcgggttatgggtttgcaaagtatgaatggcctggtggcgtcatgtctttggaccttattgacattgttaaggttaagaaatctgtaccccccccccccatcccccttcgaagactcgttccaacaagaagaagaagatgaagcctttgttgaattctccaaaaggctcagtcaaacgtagaaggtcaacccatctcaatcctgacttaccaccatctctttcacaagatttggctgctcgtgttgattctcttgaaaataaaattggtgttcttaaagctcaactaaagaaagtcagcgaccgtaatacacttattcagaacaggtttagggactctagattcctacatgctacacgcagagcaaaaccctcaatgttccgcttcaagaaactcgtccgtaactctgcttcagaaacaacctcaagattcatgcatgctagatggagagcaaaacccacctttcttcgagagctctttggaaaggatactggtgaacaagattggactcattttgaacatccgttaggtggtcttgaccgtaactctgaaccacaagtactgaactggactcattttttggttatttccaccctcatgtcaagcactttataggctccttcataacattgctattttcgtttagctgtctagtcgtcttgatgatattcaggtatgttcattgctctcatcactctcttacatgttgcgtgtgttttactaagcatagaatgtcttcatctatgtttttttagatggaagaaacaatagagtccttcaacaccgcactcactgaacaccaatctgaaaatacggacaaagaggtaaaaatactagttactctgtttagtttcattatagtagttcttcctttggaaatcttaaggaacaatcccccaaagttgtatacttttcgatttactttcaatgtttcacaagtacaaatatgtgtctcactccattctctcatatatgacagtctgaagaagttggacttgatgtaccaactgttatttctcaacctcttaaggtagtacatcacatatacattgtctttggtacatcaaactatatatgcaaactgatattgaatattccattctgatttttctctaggtttcacctgatgtggttcctgaagcgtctgaaccccctctatctgctcaagttgtaaatactgaccttcttgatcttatatcctactacttgtttcataactgtatttagttataactccacttccatctttttgcatacaacaggataaacctcaagaattcccttctgtggatatcaatatcgtaagttgtaaatgagtctttgctaaacattgtatccaagcttgagagttaattatttaatacaacattgtatccaggcggtttggtctattttacattcatgttagagatgttcattaatattactatttttaaatttattgacttttccagggtcttttgaatgatgggacattaaaccgagagattgaatttcctgaggtaccatttaagaaaataaatgattgagtaatcatcctaatcttttatttgaggcatcccctttaaaaaaataaatgattgagtaatcatcacagagattgaatttccagggtattttacacattgacctccggtgtagactatttttaacacttttagcttctgttgtgtttctatattttcaagaggattcatttttgtcatttgaaaaataaaagacaatacaattttacaatttgttaattttaaaataattaatgtttctttttctactcaccactacattcctgatgtgcatgaataattgttactttcatgtatcagtcagatttggtcatggatccatttatctttcctgttccatatcatgtttcacagtatcagcctaatggtgaacaagtgttcaagaccccaatccataatcaggtacatcataccattccaaatacatatactttatttttacattgtttttgcataagtattataaatacaccacaatgtaagcacccgtttcaaatatccttaatggaacatgggatgaagtgctgtccttctgttcaactactgtaaggcattttcttttggcttatccacattaatatgttcatatgtccagttttttttgtattcttatccatttttgattgtccactatgcatactatataagcattcataatgattatacctggaatttgattcaattcactcatatcctccatcagaaacatcatttgctataataccataccttggggtttgtgatgctctattaatgttattacttattataatactgcactatctcggccagattgtcatgctaatgattctgtatgctttgatagttttctggatcttctagttttgttgttgatccccctatatatgatactgaattgaagcccaaggaatctattttcgacaccgaagataaggcccacaacaaggagacaaagcttgttgctacattattcattacctaacagatgagcgttactgttttttaaagttttatttataggatacggccagtccattggatggagaaaaagaaatgctcaagcctctagtccttagtgactcatcccctgtaaggccgagagacctaaccttattggatcaagaagaggctggattggtgtctacctttattaataggcctcctattgacattttcaaaattttgccctctaaagatgatcctgactggccgtccttccaacagattctttccaaatttccagacacgtaagtttcacttccccctttcattttctttataaatatcttaatagtaggatctaatccttttatatagggagcatctttgtcctgatggaggccttgtaaacaactcttttatcttggatattgtcttgcctcaaaaatggattgatcacagagtatgtaatcctcgtttctttcaatcaatagtttcgacaacttgttattttatggggttcgtattttatgctgatttaaacttaggttttatgcatttttccccctttcatatcgctatcatttaaacaaatatgtactaccaaccgtttctctactggatattaatctgtaactatctatgtggatgatcttttatgttcacagtgtcatacatttttatatttagtatcttcccaaatacatacaaagacattgtacattaattcctcagagaactttccttagtagttcagaacactgttcacggtggatgatcggttatgttcaagttgtcattcatttttattttctgttctttacctctcccccattccttttcaggattcgatcaactttttattttatggagttcgtatttttatgttgattgaaacgtattttttatgcatattttcctttttatagctatcatttaaacaaatgtgtactaccaaccgtctatgtactggatttttatctgtcgtcttttcaactatatatgtggatgatcgcttatgttcaccgtgtcatacatttttatatttattatcttcccaaatacatacaaagacactatacatttattccatggtgtactttccttagtagttcagatcagtcccaccccgtactttgaatggcaaccaatcattgaattatgcaccctctcagttcgcctcctttcattccaacttctaccgtttaggattcccaataaacaaaccttttcactttctataaatcccttttgctatttcccctaacccaagacagccccaccactaaccgtaaacctacatatttctccattatcatttgtaccacactcgtattcgcctctgttcattatggaaaactaccaccgtttgtacgagttgtctcccttaataactggttggacgatatgtgttatgattcttcggatttacaagaaaatgctaaatgatcactcctttgaattgcatcttatcttgcaagatgaagcggtaatagtttatttgtaatctttgatttcattttctgttgatttcgatgcgtaatataatacgagtgtttgttttattagggcaagaggatagaggtaacaattggaactcggttttctgctttctattatgacaggctcatagagaatcaatggaaaatgatcagtactttcctcgtgcggcctaattcagaatgcataagatccactccccttgagtttcgaatctttttttttgtagcaaaccgttgttacttcatcatagccgaagggaaccgttttacttaacaactttactccatttgattacattctcgaacactcagttcggaaagatactctggttggtaagtattaccctattttctcatgatatttctccaaatatttactttaatattgacttacacttaatatttgtctcagacttgcttggggcactcattgatttcgactggctgaccaatagtgcgccaaatgggtccgatatggacggattcaagcttcaattcaggttcatcgatagcaagtacttttcttcactacctttttatagggttttctatttatttttattaactctgtccacatagattcaccatttacagccaagatatattgcaatgcgaggcacatggtgaatatgcagttgatttagagaaaaagtttcgttccgttcggaacaacaaagtagttattgccctcgccttttggaaaattgttacgtactttgatggtggtcaccgtatgaagatcgccagccatgcgcctatatctactgtttatcccgatccagatattgagccagtcaaagaaatcaaaatggtatgtatttactaattcgaagtttctttgtaaattcatttcttgtgttttaaaagtaacgttaggcttctgtaattttcccttaggttgtctattaaatctggatatatcgagtgaagccaccgttcatggataatgtctttttttttcattgctgtccaaatgtttccgaacacaattatgtgtaacgaaccttttgataatttatcttccatgtattcggatatcattttaatataactgcctaagttccttaatattatgaaagtcgtgaataatggttcgaccttatatcttccaaattatgttttacataatataatcaaaagtactacatcaacagaaccataaaccacgtcgattcaatacaatgttaatatcgagtaaatcaggatatatcgagcctagccaccgttttatggagtatgtcttattttttcttcattgttgtccacatgttagcgaacacaattatttcgaatgatcttatgttaatttctcatcaatgttttcggatgtcctttaaatatatttgggaagaatattagttcctttatgttatgacagtcatgaataattatttgtctttaaatcatccaaattatgttttgcataacataaacaaaaacccaacaacaacgtcgattcaatacaatcgattcacacacatcgtgaatatgttctttgagcttgctctcctttccaacagttagtcttctatgatcaccaaatgatcttcctctctttaaacatttattcttcatacttgttgttgtttccaaaagtttttggtcattgttttatgttcagctgctataaaatttgtttatgatataattttctggcaataatgttggtcttttgtcttttcattgctacaactctgtctctagcaaacttcttacgattttattcgagattgatctccctccaacagtaagtcttatacccacatcaaatgaacttcctttttttaaaacatttattcttcatacttaatagcatttccaatagtatatggtcaacgagatatgttcagctgctatggatttctgatacatttctctgtcaataatgttggtcttctgtctatatgttaactcgttttccacgtacatatggttactgtcccgtcgccatatttttcaatttcgtcttcattactttagggccatccccctataaaggaatacttatattactttttcccttctatactaatatatcagctttaccaaaatatctttaaattcttattttttcttcggatggaagtcgattggaatccaacgcaatctgtagggatcttgtctatatgttttcttccttatttagttggcttactttatttatgcatcattatttacttgcagatggctgtgtttcgggaatttcacattccggtcaccattcttgcaaagattgttagtctcgtgtctgaaaacagtgttgatgatttgaaggcctggattcaagccggtcgggaaggcactgaagctgtgatgtcgaatgaaacgttgagtcgagtcaggcttgataaatctgaacattccatatggtggaccgtgccccattcttcttaccacaagtttttcttgaaatgcctttctcagaataatccattagccatgttcgcttatatgagtaaatcttgggcttatcaaacgttggttaatgctcactaccgttttgggcgttgagaatcatacaatggtggaattgcagcttacaacgagtttgttgatggacgcctcactcacgagagattaacggatgtcaaattttatgtcttcctcctactaaacaacgtagaatggttcgacctaggtgcggccgttgttgtcggccaggtcacattagcacgaattgtacacatgtattttattaattttgcaatttttgctactctgataacctcgacgatatggtatcatgttcgcggttttttggttaacgactatttctgtttatttttatttttttttttaaccttagtaaaataattatattattatatgtgtattaaacattcttataatttggcctccaaaatattcactatatggatttaggctttaccatgttttattattatttgtttgtgtggataaatccaaaaaatggttgtccatattcttcagtatacagaatgtcttagttatttaaaggaatctcatattttcacattgaatttcctatccacaaatttgcgtccacatattttaagtgcagtagacttataaatacccatattgacctgttaccgaattgtacatatttattaatttggcattttgttatttttcaacatacttgaaacgaactcatgtaagggattttatggttaatgacactttcttatgtttttatttaattgaatagttaatttattatttacgcctatatatacacatctcgatattatgtgatagcaaatgtcgttgtcttcctctttcaattcgtcccggaggcgtaacaattctataagggagagcgttcagaacaattttagtgctcatgatctcaaatgtttaatgtttgccattctggcttttgtatttgtcgtactgttcattttataattactcatattgttgattattctattatttcttattaatatgctactttatcttttaatatgtgtattatacatttttataatttggctctccagaattttcactatatggatttaagcatttaccatgttttattattactttgtttttgtggataaatcctaaacgtggttatccatatcttcagtatatattaggtagtattgcccagatttacttacaaacctgtttttgtggataatactcgataccattaaccatgtgttgtgatttataatgaataatgtgatatctggatgagagtaaatattacaatatgtccatcttcaatttcataaaacatttttagtaactaaagtttctaagttagacattatgagagtagtatgatgtctctagacagataatagtagatacattgcatacatcgctccccattgtattctttacgctgattatgggaaaaccaacagtgtggaaaatccacgaaatgccatgtgtaacagtagtttccgaatcgtttgggaccgattgtgtttatatgaaacattaattcgtctgacattgaacttatctcggaatttccagtagttcttttccacaagcgtgcatgcacaactttgtagcataattagtaatagagccgcgactaggtaggtatgttgtactttgttcagtaccgaaatagctccatcaagatctaagttacggaatcctaatttcaggcttacaacgtatagagcaaaaagatttttgtttttgttttaggcaggcagaataaaaggcgtagtaagtactagaactttctgaccattggacaaaattttcgttcaggtctaggcgtacggagcttagagtcgccggagagtaaaccgcttttttaccggcccttcttgtgttcatccaacttttcaatacatcaactctgtctctagcaataatgcttacgattttatccaaaacatcttggtttatatctacaatattccccatccgtttctgcagtgcaaatatgtaagagtttaaacctagcatgaagcaattatcgcattattaataaatcaaggtttgagttatgttttgaaccaaccttctttcccattgtaacaactcttggccgtacactcgtttcctgttagaacgtatagaacgtctatcactatattttctttcttccttgtactctcccttttgcacaatgatggttttctcacttatatttatatatgtaacttattgataactgtaattaatattactgttttatggataataaccatgactccttgtttttgtaattattctgtttcattttagttatattaggtggttactatggatgttatttttataaaacccagcttactatatggtcaagattaaaatatgttaacagtatggtttactttgttgtcaatgaaatatttgtaaaaacagtcgtcaatgactttgccttttagattgtaacagattcaaacattcgatgatgtcttagccattgtacaacgtttttaataaaaccaacttaaattgaataatctagttttagacgatgtctaacacaaacacctaaccaaacctcactggacacatatgtccgtttttcttgcaaataggacattttggcctgccagctctcttcaatggtgggtttgtaactagctcgccaataaatggatcttccatacaaagtcgaccatctatgaactccatatacgctgataaatctctgttgaaggaaacccatctccctagtcggaagcattgtgtcatcaattcctcgtaagcctatcccttactcatttcggtaaagacggcggcagggttaccttcggttaggcattttttgtaaaatttatggtacgttgagtgaggcatgaaccaccaaataaaatgttacgatttgtcaagtcccacacgctttagtgtctctttcgacaagacaacatccttgcctgcatgaccacttcgaatccaacttttcaagtcttctacaccgttttccgaaactaaactaacgattttagccaataattccgctggcatgtggaactcctgctttctttgtaactacacagtaatattccatcgtcaacataaggataataaacttgcttattaaataattcacgatgtcagcttaccattcacccacttctggttcgttccattttcctgttctccattttccgccgatgaagaaaatcttgaaacttctgcttactaatggcaaaaagttaggacgaaacaatttataagtattttttaaccgtgctatatttttatattatttcaggctgtttgaccacatggataatttactttattttcctacatgttatatatattcactgatatagggaattatactataaatttatatttaataaggtttattatatggacaactattatccgggtatgtgtgatatccatgtggtttgagtgcataattttccttttctagttattataaattttatttctattattcatttctatcgttatctcttatcagagtaaactacacatactccccaattatgctcattcagttcacctcagtctattatataattctacaaatattatttgaacatgttgatagagaacgaagtataagctcaaatatataagatctgaacatttgtacgcatcctcggatattcatttccactatatatattattatttaatttaatagatcagggatatccttaggttcagtgaaggatacctacaattttttttttaagtccttctaatgaaccccttcattccaattccgctgctctctgacatcattaggcggatcggccgtcagggtttccgggagcttgctcctttcatcgccgctggtaccgtttggctggatattgtttatagtaatgaagttttagtcgatgtttgtctggacaagtttatattcgtctgctccctcgcgaatgttggatctccttgtcgcccattcctacttaggtgtttggctgctcaaaactacaccgcgaaatacgttgaacggttaagacgtttggctcaagaaggcccttccatatcatctctcgatatggtcagggaagccgctcttcatagtaattatgcccgatttgcattcggtatatttctaaaatgttgcggttctcataccgagggtaatatggtactacaaacatttcatcaaagggttcctattttcgaggaggcagaatatatcgtggatcaggtgattacccaaattcgagacatggggactccaggttgcggttactacatgggtttcaggggtgcaatagatatcccagagtgtaggcttcagcattacactggtgtttgtcctttgtgtttctcagttatgtatgtatttgaggtcagaatgctttgttagttatcgttgttgtagtttgagtaagcaactaataaccaaccttcaatgtttagtttacttcccgtcttgccaaatacattatgcatacatatatttgttccattttgtaatgtaagaaattaataaaatgacgaccaaaccagcaactataatatttccaaactcttttgaaatccctgctttcttccccccgatttccttttttaataaagcgacagtagtttgatgttgtgtgtgaagttcaaaaagttgctctatctcttccttgtgagcctctattctttcacgcattttttccatcttacttcttcgcatcctctctgtctcgtcctccatttcacaccttaacactgttgcctcctccatcattgcctcatcccatcattttccgatgtgtacctctccatcttactttaaaagtttggtttctatatacatatatacaattttgctaaatatttttatacaactagctctttaatattctttacctccaccaactcgcatgcataataccttcttcctgagtaatttcttccagatgaatgtttgataatcgttggtgctccacagtagcatttttttttggaattccatactcactgttattacggccgaagtttggcctatccacagatctagaagaactactgtcagacatttttcttactcttttgttcccttaaccgaactagtcaaaactacttatactgatttataaatcataattccgttaaagtgttgttgataattcttgtccatcatgatatgcgttcataattaatatatattttaaccacatgttcgctatcatggatcgtctgtataagtgtcattttgttagtactcgttgctacaatataatattattcaagcgtacctcttgggaagagagttaatcatttcacttgggaatatatactccctttcacatcattttgaattttaagaagaagcggtcatacagtaataataaaaacgaagtataattacccctaaacataggtttatcatttgatatctactgctgttgtctactggttgtgttatacgcaaccttgacgtacaatggaaccaccacttgacgatatagtaatttaattttgctggctaattatcaccacattaaattttttggcgagatatggaaagttatataatataatcaaattgtagtttaacatacgtatccatatggatcatgttaattattttagatgaaggggacataaattgatccatcgaaaccatttctttttccaaattcgtaaaaccagcatagttaaagttgtggatcaagtctgtactaagagatacataacaaaaaaattaaaatagccgaatcacaaacattcacttcatagtcttaagtagttcattgtaagacttcaaaaaactttcccaatcttcactccttaatcttcactccacaacctatgaaattgatttaagtgtatgaggtatttctttatttttaacataactcaaaagtattgatgttataaaaatttacttaccattctaatctcatccacttcttcaatggatggttccggggtaaacagttgatacgcctccataactcacgatcttaacatttccttcgactgctgataacttaaccaccctccaccaccccagcgccacaacgatgttaggtcttccgaactgtcggtaacatttctcaaatgtaatagcagttttccccacagtatcacaatttagagtttttttgctgaatgttgttagagtgatatcattacgagagtatatattgaatgtaaaaaaaacatgggcagtgaaaaaacgtactacttatccatgatcttgaaaggaagtatcacctcctcaccaccctcatctacattccctgtgtgagtcagcacaccaacttcaacaatggctccaagcaggtctgttgtaaaaaatttaaaacaatactgattatgattgttaaaaccaaatagtcaaaaacaaatacggaaagaaacttaccaactaacacttcagtatcataagtttcctccaggatatagtcgaatcgagttaaattgttgaattgaacagtaggtcttgtatcagctgatgtcagttgttcttttcaagtttttcgaaatagtaagctgaaaacctacggtgaattacaacttccatgcgctttccctatttaaaatttactccatattagaaatttactccaacgttgaagttttgaataaattttatgttggaaaaatcacataccgtttcatccgcaacgattacccttagttcgaaagaatcgtccctttcgtactttttgtatttcctcatgacggtaactcttactgtccatccactgagttaggggagatttcgtgtaagagatggtatttcaacatttacttcttttttcaaggttacaaataagtattaggatttcgttagttatatactaaacaaggatatatatacaaatagatataagtattaccggtttaccgtataatataccaatcaacattaatatttatttatccgattatatttaatcatcagagcatattttacaagtttatgttcatttttggattatttatccacatggtcaggatatttagttttcttaaaagcatattaccaatttaattcacatttttttttattatgtttttaacaactatgttgcccttatgaaattcacattttgtcacatttttaacaatttaattcacattttttaacaactatatttagttcatttttattttatttttttaacaactatgttgatcacttatgaaattcgaaacttaaactatattaaaggctaatttttgattaatatattaaattaaaagagtattttacatttatatttctcacttacttagaggctcgtagtttgatggcttgttttctttgaacgtattttggttatccacatgatcaacattacatattttcaacgtacagaatattcagtttttaaatatctattatgttctactatatcaatttattaaagtacaacatataaaaatcttttatcgaattttttccactagatatatgttccgcgctttatttttggttttatttataggttttatagtgtatccacatcgccaaaataagttatttccaacaaacataatatcaaacaacaataacttacacagccgatcactcactcgattcatcctttcactttgttcaaaccaatgataagtatgcaacatacaatgacagcaattgacatctttttcatgctggctttcgattccaacagtttgtcatctagcctcttcacaatttcattatctagcttaatttgcatcttatcaaaaacaactttctcctgatttatacttacagcaataaactgggacattgtttgtttaagagcattcgttcttctagccaatcttttgatctcatcaatcattgcttcgtcaacctatttgaaagtgtggttatcatcgatcagcttgaaaatcaattaattagcatatgaatttgttataatcaaacaaattttcattcacattaccttatgtcctgcagcataagcacaacgatagtaacgtctgtatggattcgtagctgacttggatattaaggccgagatactagctccacaccaacacaatttcggcacactctcaactcttcttctctaacagacatttgaagttccacttgtagctgctaatgaattactcattttttagctcaatttgggaaatggttaagaatactagaaattagggttctatgattttggggattcttgaagtggtatttatttctattggggtcacttatatcgggtttgaatttggtttaactttggtttattatattggttattggtttgctctctgggacagtaaaccaacaataaaccccgaaaattcattctttggggttccatacggactttatatttagaactttatatttcgaggctttaaccatatggtcgaccttaaaccatatggtcgaccctgttttcttagtgttccacaatttttaccttttttcattatctattatgaaattagcaactgatactataaaaaggctaaataggcattaaaaacaatttaaattgtcttgaaataagaattcatactgtatcatgatcctcacaatggagcatcaataaaacatccggtacgccgagtacataaccaaacctacccaatggttgttcaaaaaaattttaaaccatttaaaggttcttcattataacatggaagattatatagggttgctgcaacgtgctctgttgtgtccaacccctttgcaacgcgaacatcttatttggttttaccttggcaaccttcacttttctctggtcattcatagacaagtgttaaattcgtgaatatatgttcaagcgtaaatttaaattaattaccacacttacagggaactctcctatggaagctattctttttgcctttcgcctacccgacggcctccttgtccttggtggaagaatcacacgttccttaacttcttcactttgatctaactctaaggcattagcctcagggttaacaatgcctttgtaagttaaaacccatgttttggttttgaaacattccccaaccaaagttccaaaatcaagccctatactgttagctgcaagcatggcatgaccgcaaggaatttttagtttatcaaaaactttgcagctacatttcatatcatcaaaagaaaccatgtgattccctccgaaacgcccaacaatctcatatgtccagtttgtgacattttggattttgctcccttccattttcatcatagtctgggccatcaccttgtcaacgtaaggttgcaccattcctgtatgtttgatagactttttccttcgggctgaacaccatctggttaacatagccctaataaacttcaccaactccaaaataggtgcacatctccctaaccgtattgcattgtttagagtttctgcaatattgctcgtcatcaaattatacctctcaccttggaaatacaccctactccaacgggctggtccaatcttctccaaatatttgtcacattcataatttcttgattttatttctttgtatagattcctaaagacactcatcttgtacacacatccaacattcaacaccatctttgctaatcctttgctcttatatcttgatgtaacatttcgttggagatggactatacatgctccctggtgtgctagtggaaaaactctgctttttgcaacgtataggcttggatgtctattagaaattattgttagtgttgcactgtcatcaataattctctctaccttctacataaaccaagtccaagcctcgtccatttcactatccactacagcaaaagccagtgggaaaacttgataatttgcgtcttgtccgctaggagtcaataagaccccttatatttcccggtcagatgagtcccgtccacaaccaaaacccgtctcaaatatctgaagccctggattgaggcaccaaatgccagaaacatataaagaaaacgttcatcaccattttcctcaatatctgtcacaaggtctgtcatactacctaggtttgtcatattacctaggtttgtcatctttataagctccatatattcagctaatttggtgaagctatcatcatcctcccctaacacatcaactactgccttttccctagccctataacacttgctatatgatgcagacactcttaaatcttcaagaatcagcttttgcaaatccatcgggacaggtcctttaacaggctcactatattgtgctttatacacagctgctatcacccttgaagttgccttcttcttgtacattttccgagtttccacagaacaagtatggtctagtttagctttgcgtatctcataatatccactctcaggcatttcatgagctgttacccgccaatcacatttctcatcggcacagtttaaaacaaatgaatcaagttttgtgcgtgtttgtttgaagtgaaacatatgcctaatagcatatatagctaatccaatttggcaatccgacttgctagcataaacttttcctttatatacatcttcaccgtcagccctatctatatccggcattatggcagcttcatactccgtgtcatcaaacagaggaggaatatcaaactcttcatcgtccacatccgacagcttcctattttctcttgcagtttcatttgtattacaatcacctgttctattgttaacaacttttcccgttccactgctgtttgcaagtaaatcagttggatgcttaatcgaagacgttatcaaatcatcaatttccatgttcgaacctgcaccttccacactggccaccaattctgtgtctactgttggtgacgcaaatcccattctaacatcagcatcttcttccccgacacatattatatccaatgcatttgagccacccatgtcctcatccaagaatgggctccaaaactccacatcataagattggggttttacttctataatctcatcccaagtaagatcttcgcttccttcatccactagatcttcatcatcaagatcttcagataaaatttcactaacaagaggacctcgttcacaacctataactctttctatagtttcaagttctgcaacaaattcttcatcttcggaggacagcaaaaattctttcaacccgaccttcgatatactatcttctgatccacataaacgtttcgacttattccctcttccgtcatcttccttaactgaactggtcttcactagcccaccgtcaacctcagaattgtttaaaactcttttacaagatgttccaaactttacaaacatgttggttccaacatttgcttccaatatcttcataaaataacttagccccacatcagtcgtcacgacgaccggtggtgttttatctccggtggtaaaatctcttatatttggggtacagaagcttaaatcaaccttcgtactcgttgaaattccaaattctactctaatggcttccacgaattctgatagcttaatacctttatatacaggcacaattcgagatttcattaccttattaacctcaacataccacttctcatcctcctcgcaattccaatccccgcatattacataacagaagccatcctcagttccctgcaatatataaattttttatcttagacagtcaataatatatcagcgaatattttctactattgttaccaatccattttttcttaccatcgttatgatatctttgttagttgcttcaaacttcagagcttctctttcttttgttcatcgtcattcaaacttcgatgacatagttattcgttccatgctttctccggtttgcaaaaacaaaataaaccggtttccccaaactcttaccctaaataaccgattttacttgatttaattaatagggtcaattaagtctttttcccccttataattgatcacccttataattgatcagaagtgtgcctgtcggcaaaacttttgctcaacatgttttcgaaagtgtatgataatgcaaatcacccttaaaatataatatggtaaaataatttggtggtgttagctgaattggttacgatacaaacaatggtttgggtggttgattatacaagaaaaaaaagacaatgactttgagtctttgatttacaaaatcatggtacaatctaaaaccaaatgggtaaattaaattgtgttattgggtagaattgtttgttccaatgcaaacacatatttttttaaaagtataaaatcatcgttaattataaatgggccgatttgacccaataaagccttgataaaccgggctaagccgtctgaaacccgacccgggtagttctaactttttgaccctaaaacgaaagacccttctctagcacgtcggggttcgttcaaagatcaagatctgcagacatggcggacgaagcaaccagagctgtgagtacctctctctctcttaaatcagctcaattttctagtggaatattcttctttccccagtaagatgttgcagaaaatggaattgtaatgtgtatagttacaacaggcttttatggagattcaagctagcatgattgaactcactgggaagctcaaacaggtgaatcctcactttctttgtatttatcaagttttagaatcaaacgtgacacattgtataagggtttacttgtaatttgttagttcttgaactgtgtttggttttataatcccttctttcatgttgtgtaatgacaaaattggctttcctaggttattgtcatgtggtgctgaaaaactgaaatgtgaatgtggatgggttttatatataggtgcagaatcagatgcgcaacaaagagggagatagaaagcgagctttcttaaccttggaggagctgaggccattgcctgaagagacaaacacctacaagtcaataggcaagtgattcaattctctggttttgagacaaggactagtaaagttttggtctaatttgtgttttattcttgttttcaggaagaacgtgagtggtggttattagtcagtccaactagaggcctttagagaattttgaaggctgattatagtttgtatggtgaacaggtttgttctagagcccaagacagtgctggagggtgaacaagagcaaaaactcaaggacagtgaagctgccgttgcttctctacaggtaacaatcattccctctttcaacatcttattgggttattaggagatcattgagatgctggttatcaaacatgttttgttttcgggatgatttttagacatccaaggaatacttggagaagcaggtagcagaggttgagaacaacttgagggagctgttgcagcaagaaccgggcattgctcaacagattatgtccatgtctatgtaacttttgtattatcccaaacctttgagtttggagagcttttgggattgaaaccataacatgttctagttaaaagttgtaacattcaaaagtttttgttcgatcagtattgttttaaagcctctggtctatgatattgcaaaaaactgagatttcttatgcgacaacaaatgcatgatctatctaactcgaaaacaaaaattttaacaaggatgaggtctctctatgattcttcggagagaaaactcaatccttgttccaccgttcggtatgcttaccggctttcgttgtccggatgagaagactttgtttccggtgtggtctggctctgttttcggtgtgattcggctcatatttcgggtatttgttgctaaaatggaattcgctttgtttcttgagggaagattaggataagtcgattgaataattttccggcgatcttggccggaattgaagctttctgatcaacggagactctcacatcttcaactttgcatgtgtcttctaacctgcttcctgcttgccacatgtctaatataatgcatttaagcttttccttcagctttcttattggactttgttttcttttgtttggcttccttggtttagtgtttgtaaaatattggcatgttactttggctttctatactaaataaaacacacttttgacaaaaaaaaaaaaaaaaaaagactacaactcgagattgcatctaacattgtgaatatatataaatttaacctcacaatctaaacacaagtagatgtaatatatattatgaattcagtgaaacaatagttaaaactcaagttgatcaatcatcaatagcatgtgagcaataagtgtcaaaagagatacacatacacatcaaaccccaacaaatacattccttcatgtacactgattttacactacctcttcaaggaaatcatggatcataatgtctattggcatctaagcaagtccacttaacatatccatagtgtgttggcttctacgtctaaagccgttccccaaaaattcaagattgattgacgtatagaacaggaacaagtcccgccatcttcccatctcttccaggccgcttcttctttacctgtcgtagtttatcagttgatcccggttagtttacggttttaaaaagctctactcctcacaagattttagtaaccaattactacttacgtaaaaccagccatcaacttcatactctatctccaattcctcttctgccgtcaagtttagctgcaacatacccatacgtgttttaacgtttgcataatatcatatttttcaaccgtatacaaaactaaatgaataaaagacaaaagcaagcttacctcatcatctcctcctgctgtgaagtcatagagcgctgttccaaatcttgtaccagtagatttcctaggttcttcatcatctgattcataacttcgagaaccagaccctgctacagggttctcaaacgattcacgactttgtggctcagaatacgaataaggcggaggaggctcttctctaatctgaaagggagaggagaaagaagaataagagatggccatgaaaacagagaaccagcccaatttacacgacaaaaacacacaaaattatatccgcttactggggaaccatagccttcatatgtggactggtatttacttccacctgattttgcctatatgagttacccacattcatatagttaaaattagctggcacgaaaataattcataagttcttcttaactgaattgtgtgtaccctaccgttgcttgtgaggaaggctttgaactgaacaatgatgggtagttcattccaccaaagtgagaggatattgagctttccactgatccagcagaatctggagacgatgaacctgatctcgcatcttcttcctgtaaatacaacaaaagtcattttctaacacccctagaattaagttattttgatgacagccctgaagacagattaagctagcagtatacctccaattctgaagtttctaaaagagttttagcccacatgtcatcatacccaaccgaaggtctagagaagacattctcctcctcaacatccggtgcatctgttccgactccagcaatgaattcattgacctgacaagtattatataggtctgagttccatttctagacataaaacaattggtagcatttataatcaaatcatgtacgaataaatacagtagatcagatgaatggtttaactactactgaaacctgatcagaaaatttaattatgccttattagattggcacctacttataatcagaaacggtaatacccaaacttctcatcacaagtgtagtcccaaagcattcattcttgaccccattcagactagtcgaacgtttactatgtctattttgaaaacaaggtactctaacgggcaatccacacaactactcttactttctgattccttatcagaaatatttaattatgccatttccttgatcttaataagaagaatatctaaatagacacacaagcactaaactgcacacatactaatccgtttatcttaaaaggtcagataaaaatagcaactgaccctactcattgctggggcattgtttccaagaagaccatcatcaccaaggtttgcagcccaagcattcaccaaatcatcatccagaccactggagtttgaggcagcgggggcaggctgagtggactcatagattaagtccgagatcccagtagcaacaacagctggatcggtggacccagtagatgcagtgatattgtgctttgtacggtatgtgtcaatgagcttcgcgcttcataagttacgaggaaacaaaataattattatcatatgaaacctaaatatagacaatagcacctaataaaataaagaaaacggggaagtaagcatgcaatttacacaacaaaggtcagcagcaagatcaccaaagatgaactgtacattctggacttcttttgattaaaatgtttcatatatagttaactatagtgtataatcgttcttgggttttgtcagaatctgggataaaatttatacttttatttgtcctaatgaataaggataattacatgcaacacaataaactctgttgacctagataagcattcacaaaaaaagcagaaagtgttttggaaactataaatcccatcttccctatacaagattagtattgtaagtaagtattatgtattagaagttaggctgtctttgactgatataataagttcagaatactaccttatcgggcccagtggtaaatacttggctctaggaataaagcaaaacattgaaacaaaatccagcagcctctcatggttttcgtagagttttttcagctcctcgtccttccattctttgtttgcattatcgtgatggcgtatatcccttgttatcaaggaaaaattcatatgtcaaccataatatcagatagaggttacatgcacgcatcacatgaaaaaaaagaaaagaagacataaatatctttcttacttgattaattcgtcttgtccaacatacatttcatcaagaacttttaacatcggtgttattaaaactccaagacctgtaccactagctccttggtcttccccattactcaggtgcatttcagaaagttgagactgtacaccaccctctgctaaggtgtacaaaaactcgtatatctgcagcctgaaaggttcaccagatctaatggctattgtagtaagagcttgaattgcaacaattctgacctgtgtatccacaaaacataaacatttaggcgggaaaaactagaagtaacactcatcttagtagactattctggcattattgtgtctatgcttcacaagaatccaactaaagcgctaggaagaaaatcatatacatgatgtaattaagcatcacaaattatagtcagctattttctatattaagatatctaaacagatagtaataaagagagaccaaacatgattactatagtcaacttgcactactttgttcttatagtttctggtcaggcacaattactacaggtttcacattctgtttcatggttaaaaaaaaaatcattaaaagctacctaactagacatcctattcgttctcacttataaaaaagggtctcaaacatggtcttcaatctagagtactcaaatgatgaatcaaatcagctacaaaccaaaatgttcctagacatgggttaggatcagtgaccattgcaaggcaagccatctacaaattgataagaatatgggtatgaaaatgtcctacatacattgtacaggaggggaataaatcaaagccttataagacagaccaaagggcactaagacctttaagctagctttatagtgagttctacctactttgtgggattgctttgtgccctacttctatcacaaattgtccaattaaaaaaccaaatcaaaatatacgaccagcgaaatatagtggtatacctcccagcttccactaaatgcacacctctggaggcgagttaatgcaccagctagagtaggattgcgagaactagcagcagcaaccattttatctgcatccaacatcataagtgctgtgcctggtggagttgcagattcccatgcatattctgatgcggcgtagtttgcattttctccaaggaaccatacctgccacagtattccttttaagatcatgtgttgaaaacattaccaaattcatgtaaaaccttatgaggaagtcttactgctgcttgcaccaatttctgcagcgccagagctgacttaggatctgatgcagagaccctatcaattgatgtcagtccagccatggaccccggttgtggaggtggtagatcgagtactatcgtgactgcttccagagctgtgtgtttcccgtcaggaccagctccaacaagacatgtctagaagtcaatcagatgataaattgtgttaaaaaatactatctgaggtagcaaaaattcagtaaaatatcccacaataatttaagccttgcaaatatacagtacaaatatgatttttatccaattatatagctttaaaagattaaataaacaagcgtacaaacttaaagatctaaaaatgtcctaaacacaataaaaatttgaaacaggacgaaatatacaacctttttttttttttttttttttgatcaaaggacgaaatatacaacctatgtaagtaaattataatagctttagaattatatccgtaagaagagaataccttccatagcagctgtaagacatcagcgtcaattttccctggaactttggtggcaaatattctggcaatttcgagaagaataacagccatatctggagttgcctgtgaaagaaaaattaaaaagagttaactagtcagaagaaaacagttaacattactcctcaataacaagtttttcttcagtttcaacgcaatggataagaaaattgatagagtccatggtgtaacatgtttctgccagataactcttgttacaaaatctaagaaattaaagagattccgtacatcagagaactactaaatacttataggattgtggacaaacaacagagctgcttaactttgaaactgttcgcaactacactggaaaatcaaaaaagccaagaaaacatcatacttaccttaaagcgggcatgcaaagtaagcaaaacatcattgactagagctgcaggccaaccaggatctgaaagctccgaggcaatgattgattttaactcatccaatgattcatctggactttgcatccatatcaatgctttgataaccattgcccggacatacacgcactcgcatgctactgttgtccgaaccacctccattaatgcagctagcaaacttgcaattgtatcactgcgaccaggccctgcagatatggatgatgttctccgaattcctgcaaaagtcgaacatatacaaagtaggaacatgttagaacatatatagaattcctgctaaaaataagggtaaacaagtaaccaaagagtgggaaagaaggtaaaaagtgatttggaacatgttaaaactcgaaagatataaggataccctacatatttagataattcggtaaagaaaatcaaagcaataggacagaaaaacatgttcctttgtttacgtctgaagagaagactgatattatactatttttgtaaggacatcagagcattgagtttactcacatttgtagttttgtaacgattctagcatattgatgcgccatcagagcatagatgcaatgacttaactcacatttgtagttggtgacctttcaacgtataataaataataatacaacaaaattgaacaaaactcttatagaccaaaagcttgcatacaattttatgctccatacgaaattagaaatatatttgtgcatctgtcagacatctaacaaaataaaaaaaaaagattgtaattcatattaagaggatactgacaatgtaccttctggatgagaactttcattggtctcagcatcatctagagcatcagaaaatgcatttacatgaacggattcatcaatgtcctgtaatcccatagcaaacgctgctgctctactctttcccatctcttgcacaacccttgctgctgcatgaagtactggtcttgagaaactgcgaaatgagctctctaacctgaaagaacaggatcaatttgcgaaagttctttaacaagaaacacaaccataacgatcattacaatccaaagcaacattctagtgaggaaagggaatccataagatctgcaattctaaacacagtcttccaccaagctaggagtacctcctcattacaagcttaataaggggctgtggacgcttggttttattagatttatccttggaggacaaggatggtgcttctggcagcttcaggatctctctcgtcaagcgataccacccagcagcacgctcatccatcctaaatgatgcagtacattttggttattcaataccttacaaagaatgaactaagagaaatcaaagtcatagaactcatgcctctcagtgttatcgtgttttcccagaatgcacaaaatcgcctcatagcataccctttcgcttggatctaggagtagctgatagagaattgagttgaactgagacctaatatcaggcctctctgtaggaagattgaaaggaaactagcaacatgtaagttctcaaaagatctctcccatatagccagataagaagaaaaaaaaacagagcgagaacgggcagcagaaagaggttgatagtacttaccatctaatgcccgagctctagatattgagtggcacaacctagccagagaaactctagcaagaacatcattcatatgcaggatatcttgcaaagcccctaatttggtgtacagaagaaaggtatatcagctaacccagatcgtgttccaaacacttctttataattagcacaaataaacacgaaataaccagcaaaaagattaacgtcaagagataaaaggcctggtgagcatacctgttggagacgcaagcttttctgcagcaaaaagatcaagagacacatatcaagttttgaatgaaaaacagttatgtctctacacacagaaatagaatgaaaaaaacaatataagggggaatagaacaaattatttacctaatgtcattgctactgtataggggtctcttgtggctaactcagatagaatttccagtgaatgcctcaccgcaacaggatcagcaaagaaaacactgcaacataaaagtgtgaatacgagaataactgtccaatatactgcataattaggaatagaccaaaaattcaattgctcttgtgaaacctacatcactatacttaaatccaatactctatacttaaaaagatagtagaaagaaccaaaaaaaaagtcttacccctgagctgcacggtgcagaaaaagtggatttcctggatcaagagggagtcttctcagtgcactcatagcagcgtattgcaagttacttcgcataatcgactaacaaaaacgagataaaacgctcaagttaataacaaagtttagtgttgaccttctgcaatccagaagctgtatactcaagtgaggaagaattctattcgtctgcctacatatctagaagctaagttatcaaagttgttcctttggcttattgataatctgatatacgaatagaattgtaatgttttaaaaaaatggttttattaattcaaataacatttaactcgggccttaaaaatctgatagctaatagccagagtctccagatgtgcaaactcatatcattatagagcaactatgatacactgcctaatgcatgcagtcatcaacaagaattttgagaaatttctaccctacagcaggcaaagaacatgcagagcattgtaaaaaagaaaattataaagtgcaggaacatgactagtatataagccttaagtcttttcctggaggaacctaagagtttagaaagatacctctttatcacccccttttgtcccaaatacacctttctttcgtttatgcggaacatcaccaacctgaaagcgacaagaaagataaatcagggcctctgcatgtcactgggaaaacccccgtaaattaaaccacactcatatgaaaagcaataagaataaaatagtataattgtatataaataagaaaaggtgggactacggttaaatcacgcagagtgcagacaatgaactacgccagggtttattaaaaataaacaaagcatcttgttaaaaatcatagagcattggcagtcagacaaaccttttcaagaatgccaaatacaatctcatacaattttgacaaaagctcagaattgcctgatggtgaatatgtcagagctttcaaagcttgcagtcgtcgagcatgaactgaagaaaaacatatgataaggttagaaattcatctccagtcacattacagatggaaagttggaaatctatcttagatgttggttctcacttccataacccccaaattatttaaatccataccaaaactgacaccacatctaaacataactaccttttgacgtcactcctctcagcatttgggtctatcaaaagaaaattataaaggtactgggatatttcttaaaaaacattaacaactaataccattataaagataaataagattaagacagtccaaggcagaaatgtataaaataaaacactaaagcctgaaaaatgcgagtgaaactcacattcaaattcagaatttgtagcttcgtttgtaagttgattcactatccgaggaacaacatcagctcttgtgactcctccaccagcatcaatatctgctagagcatcccagttaggagtggggataccaccccctggagtcatgcccgtatcggacaaaattctagctaggtaataataaacatatcgtagcacattcctgtcttcacattgctgattaagctgtatcaatcacaagagaaaaagaatgctaaaaacctgatgcctctctttgacggatattgtttttgaaaatgcgaatttgtgaagatccatgataatttaatgggtagagaaaaaaaaaactctaatagaacaaatcattttagatgctccatcataaagttataaaaaacgatacaagaaactgtacttgatctgacactatctggtcgtcaaatgagtaaccagtgacacataccataagaagagatggggccagagaaggatcaactgagttgtacacagcaagcttagggaacacgtgattcactagttgtttctgagaacttttctgctcactcgcgaaaaacagaagaaacagtcagatactattttcagcagaagaagagaggtataaaggcagagcataagaacacaaacttaaacctgatccaaagtggcagctaattcatgaatgctccttgcaagttgcgaataggaaaccggctgggaagtcatttgcaacataaagtcgtgttaactacatcgaagaacaagacataggtatattgactcactaagactctatttacaacagagactctatatacactgatacctcctattaacaattcaaatctacaaccacaatctagttttcttagctccaatgatccagggtttagttcaaacacagataaatgtgccaaacaaaattcaattagtagatcgaaccttctttttctgtctctgcctttgtggcatgatattggccttaacaggattcagtgcagctttagcaacagatatagtgtcgttttggatctgcatcaaagtggctctcttcgatttcttctctcctagagtcgtcttcgtcgacattggatggtgcagatgggaagaagacgatgcggaagcagaagtcggctgagacgccgtggaagatgcggacgaagaagtagattgtgcaggaaccggggttggatccgccgagatcagatccattagcgtggtaccagacgattcctgtaaagaggaaaatggaagaaaggtaaacttggattcgattcttggccggtgaaatacggtgaggatccgacgatgcttaccgccatagctagtggcagatcggaggaggattctcggagaggattttagtgacgggcgattcaacaagacaaacgcaactttacaattttacaaaattatcaaaattctacacttttgttaaattatcacgaagcacgtgagatgcacgtgaatcttttatttgtcatccaaagttttgttttggtattttttggaaaaatgtcaaaaataaaggtaaattttcaaatttgggacgaaaaattaagatgtaaacctcaacgattaaaaagaattcatcatctttgcattttttgatcaagttttctcttggaaaaaacttttgaaattggttagggaaagattgatcatgttctgaaaattgtgctgaaattaaggtttcttgttctagagatattcttctacttaattgagttcgtgttgtgtaggatgcgatgagttgacgacggcaagatactcgcctatttggtgactgtgacaaagggatcgaaacctaacttttattaatttgggcattttgttataacctatataaatatgtatgtttctgagaaacaaacaaataaatgattcagcttagtcggtaaaggaatggaaaaaatgtcaaaaaaatccccaactttcaaatttgggacgatttaatcttgaacttcacagaagacaaataaatcgtaaagtttgtgttgacattctaaataaatgacaaagtttttgttgacttcccatttgagtcatgtcgttacataggttaacagaatttttttacgacgttcatgttccgtttatctgctctgttaggacaaaacaatgtcgtttattgtagagacaaacaacatcgtttcttctgttgaaacaaatttaaaccctaaatccccaaatcgatttcattatctcaaatcctatagaggccgaatcgattcgaatcccatctggtgaggagacgaacaatgttcctcagcccaaatcaaatcgaaagaagagaaaacggaagaaggaagttgaagtagacgacgtcgttttgttaacctacttaacgacatgactgaaatggcaagtcaacaataactttgttattaatttcgaaaatcaacaaaaactttacgatttatttgtctttcgtgaagttcaagattaaatcgtcccaaatttgaaagttggtgattttttcgacgtttttcccataaaggaatgttgttttatcttaaaggttgcgagttcaattcctgaacttgtaataaaaaattagattcaaaacaacgttgtttcataagttaacggaatttataacagaagacttaactctgttaatttttccgtcaattgacttaacatcgtgcccaaattggcaaaatcgataaaagttatctaattaattctaaagtcaacaataactttggtatttaattgatatttcgaaaattcatgcttttttgtcccaaatttgaaagttcgcgatttttttgacatttttcccctttttatccttcctattatgattgaatggattgtaggaccgcgaaatcctgatttgcaataaatcaaaaatctttataaaacgattaggaaagacgtttttcgaaaacgagtgaagacgagatttgatctctttccataattcaaactagctcccgcagtgtgacggttttatgagcagtggatcgcagaatacaatcactataaaaccggtatcgcagcactcgatagcggaatctgcgaacatgaaataaacgatatactcttgacttactttgagaagaaagggagaaagggagagagtttcgttttagcttttagcaaaaaaaacgagtgagtacaatgagaggaagatgtgttccttttataggagagaggtgaggaaatgcaatccgcaaatcaaagatcgtgggattcggagtgatgcgcaagtcaaagacgtgggcatgattagcggagccattatcacaaccgtttaaggaattaagattcgaataaggaatattcggatatgcttttaatattccgaatataccttagttatggaaacgatatgggctttcgttttgggccaaaaactatgttgcaaatattacaaataatgcaacaaagcctcataagtattttccccaaaaagaacattgtttgtgggccaaaggccccatttcccaagagcccaaggcccaagcccggctcggcacggcacgacggcggcggagcgtgtgtgtgtgttgttttgcataaaggacttgcatctcctacaccatagtgtcccttcccaatagctagtgaaccatgttaaatgggtagcaccatatatgctagaggagagatcttaaaacttctaatatgggacaattgtcaatatttgttattataagctttcaagctcaccactttggacctcaattactcattcataataacttcaatttttatatgtaactacactatcttatagtgctcattacaaggaattcaaagactccataatccggtcattccggtgatggccatcaccggaaaaatcaccgaagagttagccggagccacttgtgtaaaattgagttccaacaatcccccacatgaataaaattgactctaaacatttgagacttttgactgactcgataacctaaactgacttagactttacagactcaactttcaagagtatatgcaaaaaatagatgtgtatgagatagtagtatttttcagccttaaactattcactgttaatatttgtcgaatttacttggccaggaggtgaacatgatgtctttaaccacccagatttttatgtaaacctagacaacaggtaaaacccaactactttttctcgtaaaaacaagttctctagattgtgttcattttggctttgaacaatcctggatttcatgagtgaacttagagaatatagcctctcattctcctagaaacggccacattccacactcactaggtgatttgtcactagcatttgttttaagaagtctcttgtaaaactccacttatatatcaaagctttggactcaatcattaaaagcattgcttatcctttatatgtacaagaagcactgtttatcatcctggaaactaggctgcgactagtaatcttataattctccaaatatatttcgtttgatttagttttcccttttgaacctagttcttgggatctccagtcatataggtggggtatccatcaaagtgacatctttaattcataggctttaaacccattcctcttgatgattgaatcacttgatctcgtgtcaaacccttggtaaatagatccgctaggttgtcgaccgacttaatgtaatcgatcgtcattacaccgctaaaatcaagtgtctaatggttttatttcgtcttctaatatgacgagactttccattatagtgggtattctgtgctcgggcaatagtcgattaactttcacagtgtacacgtaaagctggcacgggtttcccccacattggaatatcttccaaaaagttttgaagccaatcagcttcttcggcagctttgcctagagctataaactcagactccatcgttgagcgtgccattaaagtttgtttctgtgatttccaagaaactgttgcaccacctagagtaaagacatatccacttgtggatttcgagtttctggaatcatctatccaattggcatcgctatatccttccaaaactgctggttctttaccgtagtgcaagccataactttttgtatctttaatagttgggagattaactgtgatgggtaagaaattaggggggtgttattcgttaatggattttaatagaattgaaatccaagccgaatccactgttattcaactaatgattctatatccaactttaaaatttagtgttattggaactcatctttgtaaatcatgtttaatagattttaaagtttgatgttattcaattaagattttaaatatttcattaaaatccagcgttattaaaaactaaaagacttgtaaaatatttgtatattaattcatttgaaatgaaacctctttagagtttcatgagtaaatcactagaatcaaaatccaagacatattgcagagattttgaaattcatacaaacatattcttaaaagcaatatcagaaaacaagtctaaagcttaggtggtgttattcaattattactagaacacgacagaactttttttaattactgttatattttcgacttttttttattacccaacgtgcctctactaaacgttaccggaaaaaacgtaattacaggtaatgccactgccacgtcagaatttactgacgtggattaaatgaactcagccttaactcaatataacggcagttacggttgagttacggtatgttgcggctgacttacgacaaaatatatgattcataacaaaacggcgaagtatgagtataactcagccagacgttacggctgagttgtaaaatgttacctgagttatagtataactcaggcaacggtatggttgagttaaggatggtcggccgagttataagaagttatacgataacccagccaacactatggctgagttatgagaaaaaggctgacttattacctcgacacggccgagttatagttttgaacggcttagttatggaacgatgtgacggctgatttatggtcgagtgttataaatcagccgctaatagctcgattacgatataactcagccttgttatggctgacttattttcaagagattaattactataatatcatgcagttatggtcgtgttgttgaacgttacggttgagttagttgagttacgacataccacggctgaattaactttgttttttttcctgttttaattactgtaatagtattcatgttgcggctgacttaaagatttgcttcatggctgtgttatgaactgttcgtttggtggctgacttgccacgtcatcacttcaaaacgacgttggctgtaataatccatgtcatcattccatgtcagcatcctcgacggaaatacaaaacgtcccttgcttctttaacttgttttcccagactgtgttcaccgcctgaacgttacaacatcaccggaactttcttttcttcattcatcttctcatacatcttcaatttctttcatctttctcttgatatggttggtcccgttacggtcatagttgtttccggttcgtgggtaaagaaatagagattcgtatttaaccccgacgaaagaaggtgtagagttgtgcagttagaagcggaaagaccagtttacgatagtcttttgaagatggaggtcgatgattacagattgaatcagtcgacccatcagttacggctgagttacatgttctccaacaagactcttaaaaatatgcccttcgatactccaccagtttatatctccaatgatcgatagttgcaatgttatctaggtttgacgaaattcgagcagctacgtccctgtgtggagtttacggcgaaagattcaagtgatattagtcagaaggccagatcaagaggaaggggttcgaaacgccctattgaatctaactcaagagtagaatctagattcgaagttccgggttgggggtttgaaggtgtctgttacgattatcaagaggatgaagcaggggacgatgaagcaggggaagatgaatcaggtgtcgatgaagcatctgacaaagaagcaagtgacgaagaagaagatcatgaattttctagccggtttgattttttcgacaactccgatggtgcctcatctgatgatgaagactttgctgtatacggcaagcctaagaataaagacgaagattcaccgaaaccttctccttcgaagagaactcagaccatggaaatgatcggatctgctgggagcctgactgatttaaagttggagctgtctatgctaacactcgcggtacggcaacaatacgtagcaaattcgagttggagtatcgactcaaacttcttgcgataagggatggatttgattttgatgtaccaacttctaataagactacagtaccttacgagtgctgggtggatagatgtctttggagggttcgtgcatctagacaaggaaatgatcctaattttcatgtttatatatacgattcggaacacacatgttctgtgacggaacgttctggtcgatcccgacaagcaacacctgatattctgggagttctttacagggactatcttggtgacgttggtccggatgttaaaccaaaaacagtcggaataatcatcactaagcattttcgagtaaaggtaattacaatgtttcgactgacttagtatttatctgttggctgacttataaatattttacggttgacttattgatatagtatggctgacatataattacattccggttgagttatgactttaaaggctgacttaagatcacttagtggctgagttgtggaatagtgtgactgcgttgtaaatatattatggttgacttatcgattaatatgtttgtgttaacagatgagttattcgaagtcatacaagacgctcaggtttgcaagggagttcactctgggaacccctgatagtagttttgaagaactgccttcaactatatgttcattgcatttggtgccagtatcgttgggtttcattacatgcgcagagttgttgttgtcgacggtaccgctggtaatatgggagaagccgtttttataggcgtattataccgctggtaattgggctggatataaccgtaactcggttagtcagtaaatcgaattgaacttcatgtttttatggacaactcagccgtaatatgttttaaatcagccataacaaggacgatttgtcgccaaactcagctgtaacatgcaacctttcgtattccttgccttgtcttttttaataattcctgacaactcagccgtaacattgttacatgtcttgagtgtaactcagccgtaacgaatatattttgccgccaaacacagccgtagcacggaatattttcccgcctaacacggaacctttcacattcctttacctgtcctttttaataattcttcacaactcagccgtataatagttacatgtcttgggtataactcagtcgtaacaatatattttgccgccaaactcagccgtagtacggaaaattttcccgccaaacgaacagacacggaacctttcgcattcctctacctgtcttttcttttctatatatcagttacttgaactcatcatttagacgtctcatcctcacatcttaacgacatggtgcctcacatcgacggacagtttctaagagatgtcgaagccgtgctcaccgctcctgatcgtgcagatctcccagttctaaaccctggattgggtacatgttacgtggttcaaattcaatcaccaactagctctcgcgattggtgatatactccagcgcaactttcaccatgcgtggccgacgtaccggttgattcccgttgttttcaaggcaagatgggttttcctcctcacggtaagcatcgagtttttatataaagcacttcctgtaaaccgtagaccaaattcttactatttgctctctttgtagcatatgcacacctgggattcaaggcacacgctgacggtgtggacgcagtttaatttggtggctagaacattgtaccgggacaacatgcggacactgaaacggggatgggcgcatggtttagataagctgtggtggatgacgacattagtttggaatgatttggtggacatgtttactgaatttggcccagatgatgtcggtttcatgtcttgaatgcttttgtgtctcttacttatcgtccctttatctcattcctatgaactcagtatgttactttttttttttttttggtgatggctttatatctcatattatctacgatcgccttctcagtaaagtcagttgttatcgcttgaggttacttgttaaattttatcataactcagtcatagcgtatgattaactcagtcatagcgtataattaactcatccacaacatggcggacaatttcggccaactgtctacaaccacttcgtatgtaccatcttcgacccatttaaacaaatggtcctgcatattcaatcacatccgcaattaacaacgaaaccaataaaaccctcaaatcaattatatacttacatctttacacgtaggacaacagaagtatggtcttccagggttctttgctgacgtcgatgtatagatgaccacgtctaatccgcaatgacactttgatggtaacccacgtccccaacggctgatggattgcgtactcgcaatcgatttctcggaattgctactcatttctttaatttttagctgggaaattcagagacgaaaaacaagaaggagctccggatctgaaatcagaaattggaattttataacttagggtttcgttttggggatttataagtgtgtccatgttcatttggtttttgtcacaacgacgatgtatctggtcaataacggagactctgtaacaaacctacgtcgtatctggtcaatagcggagaatatttttctctgcattctgacataactcagccacaatataggaataactcagccatcactttgttataactcggccaaaccctgaaagtgcttttcttgagccaacagtggtgaaaatcaagtaattaacatatcataaccacattccaactagtggaaccgtgaaactagctcatcctattattccttatccaacatcatactttgtccaacatcatactttgtccaacatcatacttcatagaagttttgacaaaccatgttttgtcaatcgacacttgctgaaaataaaagttattttttgttttcaaattgcacatcttcacgctactaatataaccaacaatttggtggctgttttgatatatcataataacatatggtatctcataactcggccaaatcacgaaattttattgcataactcagccgtaacgttttaatattccacgtcgaaacagaaaatttgattattggagggtttagttaaggaataatttcgaactcgtttgaattatcatctattgacgtgttcgtgtgaatatgaaaccaatcattattcgcggtccctattaagacttttttttttaatctcgagaataacataataattgtttctcgataaactcagcaaaagcaaaacacagcaatattctgactgatttgaggacatcaatcgaaccaacaataatgcttgtattcaaatctcataataacatttggttttctcgtatgtagttcgaacaatcgaaatcttctaacataactcagccacatcacatgcataactcagccatcactttgttataactcggccaaaccctgaaagtgtttttcttgagccaatagttgtgaaaatcaagtaattaacacatcataaccaaatttcaactagtggaatcgtgaaactagatcatatcctataaactttatccaacagcctactttgtccaacatcatactctatccaacaacatacttcctagaggttttgacagactatgttttgtcaatcgacacttgctgaaaataaaagttattttctgttttcaaattacacatcttcacgctactaatataaccaacaatttggtggctggtttgatatatcataataacatatggtatctcataactcagccaaatcatgaaatcttattgcataactcagccgtaacgttatttgattattggagggtttagttaaggaataatttcgacctcgtttgaattattttgaatattaactgcgggcgtgtatacctgtgtatgtggatcaaatcattattggcggttccccataaagatgttgtttgttatctcgataatgatataataaataatcttgataaacccaacctaaagcaacacgctaagtagtaacatactgtatgacgacataactcagccacaaatcagtgaaaacccagccgcaatgctatgacaagtcagccacttctaaatttattcagccaatacaagacgccgtcgtttaattagtacattttgtggcagacacgactatatagaaccagtgctttagtaccatactaattgcagtgaagatgatggctcagaggtctcttttccaaggtgaatctagtgttgatgaggtatttatctccacatttgaatagtacaaatcgttacccatctaacgttgagtatatcatgtttgtattaatgtagaagctcgacacttgctgaaataaggatacgaacgaggtacggcaaaaacaggaggggcgataagggcgttccgatcgagtgtgattgcaatgctaaggttgtcgttgccacttctcttgatcctgttacaaccagattttttttttccagttgtccgtacgaaatatcagatgtaagcatcttttcttgagttaatgttctttattttatttctttcattttgtatccctatgaatcaacctcctgttttttttataagggtcccggtcaaggatgcggtttcaagagatggtagactgttgcattgtgtgacgagtttgacatgataaaagaggagacgactgagatgaagaaggatgtggaagcaaccaataagcgcgtcgagtctcaggcagaaaagatctttcttatggaaaagaagtttgaaacgctagagaagatgtatgagagcttgaacaagtatctgtgatgttagcttaatctgtttttctcaatttgaacttctttgtactgtcaattatcattaagtcacaacgtactatcggattaaatttataataactcggccgttacattagactaactcatccacaactcaatactatctcaaccaacgttgaattaaaatatattaacccagccgtaacgttagattcactcaaccatacatcaagttaatctacgataagtccgccttaacgttagaataacatagccacgtcacatgtttaactcagctaaacatcaagttaatctacgataatctgaaagacaaagtttttgaatcacacacgcgagtataaaataaaaagtgaagtttgaaaattgaaaagacagagtttatgataacataggataaggagtactggaatccaataacatacatataatataattgaaaataaaaaatgaagatacaatcacatcaatcgccatcttcattcttcatcggactccgaaattggacgcccggtcgatccataccccagtttctcccaatcaatactattcaccgggcgttcacgctgctctctgtaggccttgccaacctgctccagcactttctcgatctcctcctccacgttaaatccgtcccccatcctctgcactctccttaagagcttaagttccgcttccttctcacgcagtttgagatcgagcaagtgtgcttccgccgtctcccttatgttgctcctgatgtaagagatgacggatttgaaacgcttttcctgttcatacagctttagggtggaaatgtcatccacagacggccacttgttgggaccgtcatccacacaccgccgcttgtttgaacctgaacctgatgcatccatgatctcggaatggttttgtttctcagagaaaggacaagagaagaatgaagagttgtagttgctaagaatcgacaagtgaaaagacaagaggaaaccagtgtatatatagtcctctaacgacgtttggtcctctaacgtaaagacgtttggtcctctaacgacgtttgggttcttgactattctggtgtcgtaaagcggtgtatgtatagtcctaaagtgacgtctagtttatttgatgggagggaagtttgggtttgacaagtcaaccaccacgttatacaaactcagccatcaaacgatttgtgtgatgacaagtcagccaccgcgttataataactcagctaaacatcgaattaaacaacaataactcagccgtgtagcacaatttgagcaatgataactcagccttcacgttagcatatatcagccgtaaaacgaatcgagcgatgataagtcagccattacattggtttttgttataattaacataataatagattcatacagacataattcttgttatcaatcatagtgtcaatatttagtacaatcacatgctaaaatcccaaaagacacagacatgttcgaaaaagcaaatcatgtctcaaaaaactgaatgggcattctatgaggtagttcatcgtagatctctgttgccattctaacccgtagcccctggatatttaaatcagtaatgccatcaaaagaaacaccaatcaataaacattcaaaaatctttaacctgtaaacgctgcagtccccggtgataatattctgcgggacctttgtaatgttcctccgctggaatgaaaattggtcatattgcggggcacggacttcgggagggataagttcgctcatgatctgtggtatcatcctcgtgaacggcctatagtgttccaggatttttccatcgcttttctttgtatgacatccgatgatgcaatcatagcagtccacgtgacacttaggcaagtccacgtgaagggccacccaatgattacctccggtttggaggatagtatacaagtgatccacatctgttatccacttcttgtttgtcgggtcttctccagtcgtaccgttgatccaaccttcatacgcggttcctttgaaagaaaccctcttcggcttcatcgtccactgtgtgtaatccctaacccacattgacgtgaaccacatgtctagaatcatgacgcgttcgctgtagtatggggtgggacaggagcctcttggtgaggattttcacatacgcagcaatgtgctgtacaaaaataaaaccaagacaaaacacaacattaactcagccgtaaccaagtaaaactcagccttaacacctaaataaatctgccattagctaaattaactcagatagaacgacacaataactcagccataaccttagacaaactcagacagaatataacaataacttacatcataagtcagccattatctactttaactcagacagaacgacacgataactcagccataacattagccaaactcagacagaatataacaataacttacatcatcacccagccatccatgtttctcgtctggccagtcctttctttcggccatgataacagagtagaacagcacctcgtccatcccatattccaaatattgtttgctaacaaatagtaaagaaagttaatataaacaaatagtgtaagcatgtcgtatttatcaacttagtaaggtataaagggccataccattcgggacttgtcaaataagccttaagcttctgcagtttggccggatcaaccggtgccagaggatcatagattgctcgtgaaggcagacaaccctttctcatgcagctcagcccgttgtctccaataactggagaagtgtgagtgggcatagcttcggggttaatcaatgacctcccatccggggccagcttaacagttttgagccgaatttcttttacactctttagcctctcggtttcctcctcatcttcatcagactcaggaagcatttcattatactcggatacaaccttatccgtgacatcaactacatccgaatcttcctcagctttttccttagcttcctgagatggttttagtttctttattgtaatctttggcatagtaggagacacctttttaggctgctgcgaaggctttcttcctcttctccctggcggtttctggattagctcatttaatgttttctcctttttctactttggcacatttggggctggtggcttcctagagcgtaaacggcggttgagaggagaagcagtctcaacgaaatcaaaatcagacacaatggataccttagcaaattctcattcaagattcctacttaccccaacatcagcttgtttcgactgcataaacgtaacgaaaactcaggcgttaaataacgaaaactcatacctatgtataaatataactcagtcgtataatatgaagataactcagctataactaactaaactcagccgtatcatattcatataactcagccataactaactaaactcagccgtatcatattcatataactcagccataactaattaaatttaaaactcagccgtatagtattcatataactcagccataactaactaaatttataactcagccgtataatatgaaaacaactcagccataactaacaagcgtttataactcagccgtaaaatattcagataactcagccgtataattcagataactcagccataactaactaaaagttataacgcaaccgaataatattcagataactcggtcataactaactaaaagtttaccggaggaggactaggagtagcaaattggttatttgtaggtttctttggaacgtctggtgtctgttgagtttggaccttaggattgtcttgctgcgtttggggctgtgttttggctaaatacatatctctaatataactgcttgattttgagtcagctatggccttcagctgctctttaatctgtttgacatcgttctcaatcgatccaaaccttccttcaaactttgcttcaaccctcgattcgatttgacctccaatcacatccagacgggaggacatttctttgatgctagtatcaacggtgtcaaaccttgagtttaagggagagatcaagttggacaccacatccacgagcgactgctgttctcccttaccatcctgcttacgagaatgaacatcctcgtcctcatcagattcgacagctacttccttcttcttattcttcttcttcttcttcttttctacatctttctcacgagaatgaacatcctcactgtgagagaccttctgcttctttgcgggagattcagacacctccgcttctttatcttttacgagtttcttcttcttctcactcgtcttcacatcccaataacctttaacaagcttaagctcgtgtaagtcttggatcaagttatccagtgctgggtcttctaattggtctggccaaaaatgaaacagctcgcttaactcagccttttgaaccattgtacgaacacacagctacaacacaagagataataaaacccatgagtatgtttaactcacccatcacttaagataactcagtcgtcacttaagctaactcagccattacagaacatatctcagtcgtcacttaatataactcagccattatagaacataactcggtcgtcacataacatatttgccaaaaaaaagagaacataactcagccttcacagaaaataactcagccttcacataacatacttgacaaaaaaacaaaacattaactaagccgtaacataaatatttgataaaaaacagaacataacagagccgaaaccgtacctcaccaccattccctttgatatcttcagtaatggccgattctatagttgcacgggtacggttgccaccccatctaagcaacggaatctcatccgctttaacaacgttcccaaaacgctcggcgatggtgatgattgaatcatacgcccaagcctgcaacacaaaaaccagaccactgacggtgtacgtcttgccaataggcctcaacaactttatagaaacgacaagggcttcaaatgctgcccgaccccatggataagtcttcatggcttcgtcatcgaaaactcttttggcactctcaaatggtatcctagagtttgtatgcaagccataaagtccaatggatagaagagtcaataacccaaaccatctacgcttttcagaaagccaagctctgcacattactaagccatgcctaagttcatctagattaggaccttcaccggttggcacacgcaattccctgaagaacgctttgtagtcagcttcaggctcaaacttttctgtaggcagttgatctatatttaaacccgtgatatgatgaaattcgttcaatccaaaccggttgggttgaccagccacgatacaccaaagctccttcttcagtattctcagttgtctgcatagtagataatgtacagtcttaccagaccatagaaaatgactatcaacaaacttagcaattaatccaagctgtgtctctttcagttcttcccatatatcttttcctattgattctctaattgcagggaactctcccagctttatgttgtgattaatgcctttaccctccagattagaatccccctcttggtaaagtcttggagggtactcccttgcttggtcttcaaacatctgtataacgataaatcagccgtaagcattccataactcagccataacataaaacaaactcatccacatataccataactcaggctaaaacataaatctaactcagccatagataacataactccgtcataacataaacctatctcagccacacataacataactcagccataagataaatctaactcagccatatcttaacaaaaacttagtcaaaccataacataacaacagcttagttaaaacataaaccagactcagctatatcaaaacagaaactcagccataacataaacaaactcagccgtcatataacagaaactcagtcatcaatgtaaggttaaaccataactcagtcacagcataaaacaaactcagacacagatgaattgataaatcataaatcagtcggcaaacaaacagtaactcagccgtcaaatcaaatagatctaagaaatcggccaccatatgtcaatcaacgacgacgttaaaaccgagctttaaaaaccatcgttaagcatcaaataacgatttcagtgacgggaatcacttgcgattgaacttagatgtcagagtcttgtcggaaaattcgaaataaagtttggaatcatacttaccggaacttagccagaaacaagaaatgcgactccagatgtcggaagtgacttcgcgaaaccagaaattagactccggcgtaagagttcgttccccgtcgagagagaaagaaagagacagtttttttttttttcgccgatgaacagtaagaaactgaaacgtttgtgcgttttgtgatgattaatgacgtggattatgttaatgacatggaatgatgacatgtataatcactgttttttcatttaagttttagttaaaaacgaattaaattataataattaattaaaactaattaggggtgttaattgtaattacacaattactgaaaacatctgagtaataaaaaaaagatctgttctattctaggaataaacatacaagtgtgttctatcttaagaattatttctaaataatttaacactcttgttatgcctttccagtatgtatgacctggattactggtgtagcgacttaatacatttactgcatgcgctaaatcgggtcttgtacaatttgttaggtacataagacttccgataacccttgcatactcaatctgtgatacagcttcatccgaactatttctcaagtgaagttgacaatctacaggagtttttgcagttccttttgagtagtttttaaaccgctttaatatcttttcagcataatgtgcttaagacagagttattccttcagtagttcttgtgattttaatccctagaataacatctgctaaacccatatctttcatgtcaaattgactatgaagcatatttttggtttgttgaattatatcttcagtgctaccgaggatgagcatgtcatctacatatagacataataaaacatatgcattacgagtacttttaacgtcaatgcacttgtcgcattcattaatgctgaaaccatttgacatcattacactgtcaaatttttcatgccactgtttaggaggttgttttagttcatatagtgacttcacaagtttatagacattgtgttcttgtcctgggactacaaacctttcgggttgtttcatatacaatagaacctctataaattattactctataaattaataacctctataaattaataaatgtcccgagttaggatcagtgtaaaaagtaatacaaatcgataaattaataagattataatttttctgaaagtcctatgtaaatatatggtcccatcaatatcataaattaataattgtataattttatttattatatatatgtaaaacattctttaaatatatttataataatttgcttaaattcatatttgttctttgtttgactatattttttatattttactgtatcaaaaattttggtgttgttttctaaacattattattatgttttacttgtaactcgttctagaaaacatttttctataatgaaagaaatcttatagaaatttttcaaaagttactatattaggaaaatttctctataaattaataaatattaatttatcgataaattaatacctctctaaattaataaaattttacagtcccaacattattaatttatagaggttttactgtaaatttattcttctaaatctccatatagaaaagctattttacatccatttgatggatttccaggtctcttaacgctgctattccgattagcattctgattgacgttatcctcgaaacaggagaataggtgtcaaagaaatccagaccttctttttgccggaatctttgtaccacaaatctagccttgtacttatcaacagagctatcggtttttgtttttgttttgaagattcatctacaacctagtgatttaaactcttcaggtaaatcattactctcagttgcacaatacgtcaagatcaaccaatccctttaacattcattaagttcaggaacatgaatcaagatatgcatcgctagtgaactcacttggctaaagacgggttatgagacaaagatggtccctttaaggtggttcagactttaataacaagagactatcaataaaaaagactgagctttagaagaatgctaaaggtaagtgccaacctattaatacaagaatagcacctcatctacccaatgacataaaccatgaataacaagtggatggtcctatctctaaacccaatgatgatcctaagtctaccattttccactaaaggcatatttcaattttttttcttggatcaactcattttctttcatttctttgccccttgatcttaaggagaagcttttcgtaaactctatgagtctagtctagtgaattgagtttttcttaaactctaatggctctatgattttttttcttttttttttctgtttttgctgccattttttctagagtatatcttatcaattctatgcttcccaaacattcactagacctcaatatgattttcagcttccttctcctaaagattttaacccgttttctttctttttcttttcatactcaatctcaatccccaaataagttcccatctagtcctaccaagtccgaaaacgcggattagaactacacggggtactactcttttcggctcaaacctaacacgttataccaagctcaatcctgaaaataggtctcacatgctctcaccaataacatggcttgaaagaagggttgattaatggtggaggaactactccaataaaagaagcagctacttggataagcaagagttgtgaataaatgaaaaaaaatccaaatatgtattctatccatgagttcaaaaccgatgcaaacatgataattataagtcagattcaagttcaaattgacaggaaaaggtgtcatgacatgcaacgagtggtttctatagaacatggtgcggttttacttcaaagtcattcaaatgcatcagagaactaataactcatttagtgaatcatcatgcttacaaggttacctcctcattatcccctatgcatatacaacaagcctaaatgaaacactctagactcgatcctaaatgtaatgcaactacatgaacactctgtttttgtgaaatctttttctgaattttttcaaaaacattttggtttttctacgccttagatgaatgcagattcaagagtatatacaatgcaacacacacttcctgagccctcccccaaacttaaatcacacaatcctctgtgtgaccaaatttggaagagagtactcaggaaaaaacacatcacaaaaacaaagtataaacaagagatggtatagtacaatggtgaagcgagacgcttacctcagtcgaagaatgaacgagttggtcgtcaatggctgcatgtgattgctcccaggccattgaagagtcgacatgttctatctaagctccagcatgtgggtactcaacctcattgcctctatggcggccaacaccgccatgagtatactcaatctcccttcttctgctgcggccagcaccacggttatctccctcaattatgcgtgtgacctcaggactggggagaaggatgttagctttcttgtctgtagagtgctcaaacttgaaacaatgcatgttgccgatcatttcaaattcaaggatttcgcagtggcgcagatgctcgagatccattgctcgtggctcaagtccatcagatgtgattgggactccataagcgatcagaatcgatgtcacaacccctcctatgcaaagagtgtctcgtgctctcttgtggttattggtgacaccccagctattgtatccacacaggtagatcagaagaagtatagagagaggtgtgtcattggtttctccttggagagacatatttttcttggtttggcggagagtgcctttgagagccatagcgatcatctccatatcagaattggtgacagttcatgttatctctcgggagtagaggacattggctacagaacgctggaagtacctgatgataggattgcgtttctgattgctcttagatctagtagaattcagcggtacagagctgccaatggtgatccataaatccttcaattattctctgtcaaacttggacttagtttccgttccactggcgaaaccaaacaatcattccaagcgcttgattgatatcatacaatcctgaccttacacaaagaatctcaagaatctcaatccttcactttccaaatcatcagaggtcataacttggtaaagctccacttgtagtgtggagaggaactgaatcgtttattcctcataggctacatatgggtaaaccatcagagtgtccaggtgacaactctggtacatgtgctgaacatcctccagtaatccaagctgtgccagcgtagtcgagcatggatatcttgtgctgcaggactcattcagcttgaagagcctgatatactcctcagctgggaatacatcaggcttgtgcagaagttttgtggctctgtgagaatgttcaggcatatactcgacctccaactcttcgtctatcagctcatacctctctatcactcctctcttccctcgagctatctcaactcttctcctgaaattttcatattctctttatattctttccgatcttgaagacgaagactcagcctcatccatgtgatagtcaagatccattgacgaaccatcattgtaattgctcatgatagtcctgaaaaatatttagaattcaaatttcaaacgttaataggttagtcttagagaaaaccacaaaactggaattgttcttaaaaggcaacgaaatggaccagtgtggtcgagtaaacctggtactcagtcgagtatggtaactcttgttacttaagatatctttcacgatgtgaatcgagtagcagagagcagtggtcgagtaaaccttgtgagatcgagtggtttttctcgacgaaagcaccgaggatcgagtatctcttcagtgaaccggaattaacagacctgaaaccttgaattgatggtcgagtgtgttcttgaggtttcgtcggcttcgaggtgatgaacggacttgcagatagagttagactgcagttactcgacggagagctcgacgacggtgcagaggtcgagtacagtggttgaaaccgaataacggagatggtgaacttgctaaaagtggtgaggcggtcgagtctactggatgaaatcgagtgattcttgaggtttcggcggctaaacttattctacttaatggtgaatgagacggtgaactcgattgcggaggcgtagcagtggtcgagtatctttggacgtcaaggtcgagtatctttggatgagagagagatggcgttttgtggtgaaggagagagattggagtgtcggtggtggaagatgaagagagatgggaggtaacttttagtgtttggagatgaggaaagcaatttcaaaaggtgtggtggagaatgaatttgtaattctctctccatcttatcctcaaggagaaaacgcgtgtggtccaccctctgttgacttgtctttaagctctgttccctgttgactggataaacctcagtaatcctaaaatcctttgtaaatttcttttggtcgagtataatgtttaatcgtttgatcgaaacaacattatactcgatttccaccggtggtctccacatttcttatgttggtcgagtacttggtcgagtatgaaggctcagttatcaaacttactcgaccacatttcctcatcagcatgtggttagtgtgatcgagtgacatgttgaagctccaactgaaacactcgatctctacagcatgtggtcgagtgactctttgaggttgaatccattacacttaaacatttgcagttatctcctgaaaacactagtaaaatgcatcaaaaataacaaggaaaacaaaaatatatacagagaaaggcatgggacttcttcccaagtgagcttgttttaagtcgttagtttgactaccttactcctttaatcatcaagaggttcctggagatgaacagaagtcacctttggaaggatttgatcttctaagtatttcttgagcctttgaccatttactgtgaaatctccactcttaacagctagagtgactgctccataaggacggatttcagtgacacagaagggaccaaacaatctagacttaagctttcctgtaaagagtttcaagcgagagttgaatagcagcacctgatcaccaacctagaaatccttggtgatgatcttcttgtaatggaaaagtttacttttccccttgtagtttttagagctctcataagcttctaaacgaatctcatcaaggtcattgagttggatcaaccgctcctcctcagcggtttttatgtcgaagttcatgagtttaaccgcccacatagctttgaactcgagctcaataggcaggtgacctgattttgcatagagaagattgaatggtgttgtaccaatgggggtcttgaaggcggtcttgaaggcggtcttgtaagcccacaatgcgtcatcgagctttgcagacaagtcttttcttgtaaccccaacagttttttccagaattgcttttatctccctgttggagatctcaacctgcccacttgtctgtggatgataagaagtggcgaccttgtgctttactccatgcttcttcaagaggttctcaaaagctttgttgatgaaatgttttctaccatcactgattactaccatgtgaactccaaatctcgtgaagattatggtcttgaacagcttcaacacaacttttgcatcgttagtaggactgacaatagcttcgacccactttgatacataatctacggcgaccagtatatacttgttaccgtatgaagatgggaatgaacccatattattgattccccatacattaaagatctccacttacaagattggtttttgaggcatctcattcctcctactgatgttgcccttcctctggcatgaatcacattttaagacaaacttttgagcgtccttaaacattgttgaccaccaaaagcctgtttgcagaatctttgacactgtcttgaatgtcccgaagtggccaccatatgcggagccgtggcaatgtagcatgataccttctacttcatcttctgagacgcatctcctatagatcttatctttacagataatgtaaaggtaaggctcatcccagtagtaatggtgtatatccttgaaaaacttcttcctttcataactggtcaagttggagactctactccgcatgccaaataattgacgtgatcaacataccatggagatttttcctcaacaacattcagttggtggaactttttcccgctgtaactcccaccaaagaattctacaaccatgagttgctcttctcgcattgagtcgtctatcggaaaaggttcttcaattctcatccttgaaagatggtaagatgcaccatctttgcatatagatgcctcaaagctgcatggtctgtatagaccgtgaccttggatccaaccaaataccttctgaacttctcaaatgcgaatataacagctagaagctccttcttagttattgcatatcttcattgagcttcatccaacgtcggctggcgtaatatatgacgtgaagcttcttgcctattctctggcctagtatagctcctacggcataatccgatgcatcgcacataatctcgaatggatagtcccaattaggagctcgaacaacaggagcagataccaaagcttccttgatggtgtgaaaggatttgaggcagtcctcatcgaattcgaactcggtctccttgcataatagtctagttaatggtctggctatcttagagaaatccttaataaacctcctgtagaacccagcatgaccaaggaaacttctaatgtctttgacagtttttggtggctgcaattgcataatcactttgatttttcccttgtcaacctctatacccttctttgatatcttgtgacccaacactatgccttccttcaccatgaaatgacacttttcccaattgagaacaagattagtctctttgcacctggtcaatactctgccaagattcaacaaacatgaggagaaggaagggctatagccgagaaatcgtccatgaagacctccactatctcctcgattaaatccgaaaatatagaggtcatacacctctgaaacgttgcaggagcattgcataaaccaaatgccatctcttataggcaaaagttccataaggacatgtgaaagtggttttctcttgatcattagggtgaattggtatttggaagaaaccactatattcatcaaaaaagcaataatatgggtgattagctaagcgttcaagcatttgatcaatgaatggtaaaggaaaatgatctttcctagatgcaacatttagctttctataatcaatacacatcctatgccaagttatagttctagtctagatcaattcattcttttcatttttaacaacagtcattccaccttttttagggacgcaatgcactagagaaatccaagtactttcagagatagggtatttgacaccagcatcaaccagtttcaaaatttcttttttcactacttctttcaagttaggatttaacctcctctgtggttcaatgctagaatatgatacgtttccaacatggatcctatgattacataaattaggtaaaattcccttaatgtcagataatgaataaccaattgctctactatactttctaagttcagacaatagcaggttaacttcatcatcatttaactcagtattaatgatcacatggtaagtagagtttgaaccaaggaatgtgtacctcagacctttaggaagtggtttgagattaaccttgggtgccttgagttcagaccagtcatttgaagctggaatgatcagctccacagtgtcgctgacggttgcgatcgagtgattggtcgagtatgtcctcgagtgagcaggttgaacctgtgttgacctttcttcactcatcgtcatcacctctgttgttgccccattcaattcctcaaagggttctaactcttccatcgctttatgtgagtctaacaacttctagtagcacaaagtctccagatgcagaaaccgtgttcaccatttttggtcaaagcactattaaggtgatcttaagctcttctagtaactcgtcagctaactgatccatttcttcgatccaaaagagtttcccttctatggtaggcttcttcattgcatctttgacgtcaaaggttatcccaaaatctttgccaaggtttagatcaatcttccctatcttgacatcaatcatagctcctgtaattgctaagaaaggtcttcccaaaatcaaagggtctttgggctcttcatccatctccaggactacaaagttagttggtatctctacagctccaatcctgattggtaggttttcaagtaaaccttgagggatccttactgacatgtcagctatgataagggatatgtggcaagatttgtatttagtgaaccccaatcttttggcaacggagagtggcatgggactgagtgatgctcataaatcacataggcatctgttgaaagccaatggacttaaagagcatggtaaagtgaatgaaccaggatcactaagcttgttgggaatgatcttcttctgtataatagcacttcattcgtaactcaatactaccattccttgcacttcttgagttctctccacgatcaagtctttcagaaacttgtgggaatccgggattagtgctagaccgtcaacaggaggtatctgcaactcaacctccttgatgttcttggcaaacatagctctatacttatttgccaatgctttcttatgacagccaggaaatggaagctggggtttgtaagggggaggaacaaagacttttctttgttcctgacatcaactggtttcggagctgttggtgatgttactaggaatggtggtcgagtaacatggtcgagtggctgctcaagttgtttgtcagcttgatctttactgagaatgaattcctccctatcttgatatacactatcctaagtgactgtcttaggttcctcttttgttggaagtgcttttctactgcgcatggtgatagctgtaagaatatggagctttaggttgcgagaatgggactcttgattaagagggttgagagtgagaaatgaacataaggaagagatagtattgcggaaatagaagagagattgtgagaaaagatattttctctatttcttgattaaaaacatacatacgatacaagctatatatggacattaggtaagtaaagatctcctaagaatatgctaaacacgtcgcactctatacaagtccacatcgtgtagacaagtcactatcgtactaaagaaagagacatgacctaacattcggtttgctttaaacacatgtgatcttcttttgacttgggcgcttaagcttcaacggctacatgaggagtcttctaggtcttctagaagagcttaaggtgaagaagagtttatatgggcttctctcattgtcatgttgtacggatgggcttctcttcgtccgtacggtcgtctaggttaacttgcggaaggggtttccttcattaggttcaatactccccctcaagcttaaccggagatgagtcgagattaagcttggaaccaaattcaaccacctcattaaaaaccttagtgtagaaaaacctcttgggataaaactacacacaagggaaaaagagtatgggatatttgataagaggatcatggccgggttagatcaactaggccaagtttgttgtgaatatattcacacaccttggtgctcgctcctttggtgaagacgtcggctaattgttcctcaccctcagtgtaatgtggtaggatcactccgagttgtacttgttctcgtactttgtggcaatctacttcaatgtgctttgttctctcgtgaaacaccgagttggaggcaatgtgaatcgcagcttgattgtcgcaatgcattggaatggggtttggtgtatcagtgccaaagtctttaaggagagctttcaaccacatgagttcagtagtgagctttctcatggctctatattcggcttcaacacttgagagagacactactttttgtttcttgcttcttcatgttactaggtttcctccaatgaaggtgcaatagcccgttgtagatcgcctatcttgttgatgtcaggcataatccgcatcacaatatccaacaatctccgtgtttctattgcatcccatccaaatgccttgacccggagctcctttgagatatttgagaatgcgattcaccatgttccaatgatgtattgtgggagcttgcatgtgttgagttactacattaacaacaaaacaaatgccaggtcaggttatggttaagtagataagtttaccaacaagtcttctatatctcgtagcatcttcaaatggtttgttatcatgctccccctttcgtttggccttgtaatcgtcctctagtggagtcttggccggttttaccccgagtttacctacttgggcaagaagatcaagtgtatatttcctttgggataagaagagaccttcctttgatctacaaacttctatcccaaggaaatattttaactcaccaaggtctttaatatcaaaaacacttttaagaaaagtttttgtatcttgaatacctaccttgtcattcccggagatgataatatcatctacatatacgagaatgactactatacctttttggcttggtaaagtgaagagagtgttatcggcttcagaccttttgaaccctcttcccatcaatgtggtgctgagtttgtggtaccacgctctcggagattgctttaaaccgtagatggctttcttaagcttaaagactttattgggagcattaatgtcttctagacccggtggtggcttcatgtacactttttcttcgagttctccttgaagaaacgcatttttaacatccatttgccaaagatcccactcgagattggtcgtcaaggagagtactactcggactgtatgtaactttgcgaccggagcaaacgtatctagatagtcctccccatacgtttgagtaaatcctcttgccacaagtcttgccttgtatctttcaatctccccgtcactcttatatttaatggcgaagacccacttcgaggtgacaactttcttacctctaggaagctcatcttcatcccatgtatggttgttctccattgcttgtttctcggctgcaatagcgtccctccatacttgatgagttatagcttcttcataagtttgagggatccaatgttggtctacttttccaaaaaagacttgatgttcttcgggtagatgagctagggtgcacacaacttgaattgggtgttccacgacattgtcaaagtagacttggttgttgtagtagactctcttgtctttaagatgttcacttcttcttggtattctcggttcttctcgagagttagagtcttcttcttggttattagtatgaccattgtcatcgttaagtaagcttgtatccttctcttgaaccttagaactctccgtttcttcaagagtaattagttcttgttcttttccttgtttttcttcttcttcttcttcttcttcttcttcttcttccatgttctctggttgtgtgatagtctccggatttgaggttcttggtgttgtttgagtctgaatattacttacaccaagtctttcaaggatgatccggagatttgtagctctatccgagggagagtcagtaagatcttgaatatcttcccaattcttcttatcatagtagcttttagactcgagaaacttcacatctctagagataagaacttttcttgtttctagtacataacatttataccccttttgattaatagagtaaccaatgaacatgccttttgtactttttggttgtagcttgttcctttgttctcctgaaataagaacaaagcacacacacccaaatactcgtaagtgattgataaacggtttaactttattaagcacttcaaagggagaagagtctagtaagatcttagttggtgtttggttgattaagtaacacgctgagaccaccccatcaatccaaaaatgttttggaacatttgtatggaacatcatgactcgtctgacctccataaggtgcctattctttctttcagctactccattttgttgtggtgtgtatgggcagcttgtttgatggattattccatgtttgtttagatgttgtttaaaggcatgacttgtgtattcccctctgttatctgaccttaagatttttatcttagcatcataatgattagtcacataagtttgaaagttagtaaaagcttctaggactctatctttagaaggtaataacgtaaaccaagtgaacttcgatttttcatcaatgaaggttacaaaatacttatgattttctctagataagcaaggtgatgtccacacatccgagtgaataagatcaaaacatttctcatagatagtgctagatttgggaaacacggatttgcaatgtttaccaagaatacatgcttcacattcatcatttttaaaagaagtacttggcaacaaaagttttaaagcgcgagagtgaggatgacctagtctagcatgccaactttcactattcgcattaccaagaatggaactaaaatgagaagataagggaacggatggctttgtgtcttcaagaacataaagtccatcctttgtaactccttgaccaagcactctactagtctcaatatcctgaaaatgaacctcattaggaccaaagatagcataacaatttaaatcggttgtagctttcttaacggatagtaagttagaggtgaatgtaggcatatagaaagctttagagcttttatcaaacaaatctagatcacctactcctttaaccggaattctatcaccattagcgattactacatttcctaaagccggttcaatattacttattaacttcgaatcactaatcatatgatgagaagctcccgagtcaataataagaggctttaaagagctaagggcatgataagatttaccggaggactcctttagagccttaatgagagctttgaggtcggaacgcctcactaggtcagaggaagctgccattgctgccccattacctcccaagtgttggtttgatgttccggattgctcttgagttccaaagttctctccggttacttgattcgctcttggttctctccttccgggtcttaggtgagggtgaagtgtccaacatttctcctttgtgtgaccgcttctcttgcaatgttcacaccatagagcctttttgttgttgtcatacttgtaattccctcggttagctgtagcgagatcacttagattgactcaagctagctctcctttgttcccaaataacccgagtgaaccttgttccttttggatttgagagcatacttcctcaagatttgggagcttgtcagctcgaaggaggtgtttgatgagatcattgtaggtagagctcaaagtaaggagaagaccaaacactttatcttgttctctcctttcgattaggacctttggatctagagtgttaggtctcaacatctcaagttcagcccaaagagacctaaactttccaaagtgttgagtgaactccatgtctccttgagaaagatcgttgatggctttctttacttcgaacactcgacttaagttggactggtttccaaacacattgaagagagtttcccatagctccttggcggtctcacaatatgagtaagcttcaagaagggaagcctcaagcgagttttggagtagagctaagactgattggtcctcttggaaccatttttcttcaccgacatgaactatctccatgccttctcttatggtcgcctcggatggtgcttcactcgttaagatgtgagcccaaagtcctcggctgcacaaggttgtcttcgtggttcttgcccacagaaggtagttcactcctttgagtgtaaccggaacaaacaaagctttagtgttctccatggtttagatctgaacggaccggaggataaagcttttaaccgaagagtaaaaggactcgttttattgaagaggaagaagaataagaatgatgtagagtagaatgagtatatggagctttatggctctgataccatgtaagaatatggagctttaggttgcgagaatgggactcttgattaagagggttgagagtgagaaatgaacataaggaagagatagtattgcggaaatagaagagagattgtgagaaaagagattttctctatttcttgattaaaaacatacatacgatacaagctatatatggacattaggtaagtaaagatctcctaagaatatgctaaacacgtcgcactctatacaagaccacatcgtgtagacaaatcactatcgtactaaagaaagagacatgacctaacgtttggtttgctttaaacacatgtgatcttcttttgacgtgggcgcttaagcttcaacggctacatgaggagtcttctaggtcttctagaagagcttaaggtgaagaagagtttatgtgggcttctctcattgtgatgttgtacggatgggcttctcttcgtccgtacggtcgtctaggttaacttgcggaaggggtttccttcattaggttcaataataggatgagcatgtgcatattcttttggattctaaattgattttcctggaagttggcttgactgtttctgagcggaagtagatgcaaaaactccctccaggtatgtgactttggaattcagtgtctccaccttgacatttagatcattgtagctacagtccaccttccatggagccagatgcttgtccttggagtagatgttgtagcatttgtttcatatcagcgttgggagcagcaggacctttgtgttgctgaggtgcaaacccaggtggtgtttgctgctggtagttcccccgaaattgctgcattggatcgaaaccttggttgtagggaacaaaaggtttgttctgaccttgttgttgatgatgtggaggatacacctgatcctgtagattagcaacattggtgctgcggtaggagaggtttgggttattagtcttgaagttgttgtaccctttgtagccaccttgattgttgatgtatttaacttcttctaactggttcccctccccatcttggacttgatactgctcgtcatcaacaaggaagtgcacatgcttctactggctaagaagaatcttgtccagcttgtcattcagcgctttaatctccttcttatgtatgtcatccgagtcagctgttcttctgatggtcctgtcttagttctcgttgtaattttcatctgactgagctaggttctcaaccaatttccagccttcttcaacatctttattctggaaatttccattgctggcggtatctagaagcatttttatccgtggtagaacacctctgtatagagtgctgagcagagaggctttcttgaagtcatgatgaggacattggttaatgtaacccatgaaacgctccaatgcttcacagaagctttcaccagtcttctgtgaaaaaccagagatctcatttttgagtctatcaaattcctctaagtggtcgagtgggtcttccataggcagaccatggaacttgttcctctgaaacatcgagatgagacaactcttaatctcgaagttgttattctggattgcaggaggtgcaattcctttcctctgacggtgatctcgtggtgtatctctggcaccaatgtttgtagggccattttgttgattttgttcatcagccatttttagtggttgttggggtacaaggttgaccatgtttctcctttttcttagttcgagagctatgtggtcgatgttatcgttgtaaaggaggttctggttgccggttgatcgagtttgcatacagcagcagagtggtacctggatcatgaagacaacaagaaaaacacacagttagtaccgggaaatgaaaattgaaaaagaatttgatctacgcaaatctgaaatcttaaatgtaacaaacaaacactcaattggcaacggcgccaaattgataataggtttttagtcaattatcctaaatcactatcatgtcattgtagtaatgaaggttttcaatccaaatgggtgtgatgctaacaatctagatgcaatcagagttcatagagtcaagccaagcaatagcaggtttttagtttcaaacagttctaggtgaacatgcaggaaacagaaattcaagaaaaacagtaaacactcgaccaacacagcttgttatcaactacatggtgtggacgagtgacaggtcgagtaaacagtaaagacagtggtaaagatactcgactgcacagtctgttgccagacaactgcgtggtcgagtatcacagtgataacaggcgaaaaatgcaaaacccaaacaatagccaacaagatgtagtaaacaatagtagagtaaacaatgaaatcaattagatgaggaattcccgaggatggggtaattgagtagtttcgtttcctcagtttacaggtgattgacatgctcaataaactatcctagacaacaagttcgataaccaaatctaagtgccaccgcaacagagatcctcaagttaagctagtctaagactcaatcaccattgacgagaactaacctaacaggcattacaaatcaacaagttaaagccaaaacgctccctgtaaccaataccttggtacaaagccacaaatctctggaattagtggttcatatatttcatcgaacaccttttgggtacggaaatgtctaggctcaaattccagtttatctgaaagcaataggcattaagaacaactaatccagaagggatctataaatccaactcaaccatctagtatactggggattctaaactactctaacccgtccttagaaacctagtcactactcaaacatcattgcagaaaacataaacgatgacaataatgaaaacatgatagcaacaaagtaattgcaagatgataacaggatgatcacaacttagtaaacgcaatgaaaagcaaatactcaatagattaagagaaatccggattccaaaatgtcaagaacttaaactgtctacggaataaaaacttgttctcggaaatgtaaagtacatgctacttatagcgaaatattccgaaatcctaatactcaaaacgacatcgtattgggacggattaagaacggtactcgacccaggtggtcgagtagtgggtcgagtgacaagtcggagtcttcttctctttctcatgctcgaatgtctggttgagtgcggaatcgagaagaatctaaagcgatgatgctttctactcgaccagggggtcgagtggtgaaccagagtgttgcggtcgagggactagctacggaggtcatgaccgagtacttcaagaatgctaggatgacggtactcgagctcgtggtcgagtatggtgatttgatcaggtacacttcttccaattagctcatcagcagctccaaatcacctgaaaacaacacaactatgcaatatgcatgcaaaactgtcctaaacatgcaaagtgatgacaaatgatgagaaatggtataaagcagtggtgataatatgataaagtgatgacaaagggatattcaaaacgagtaaaatgcacacttatcaataacctctgtcccttccattacttctgcaaaatcatcatctaaaattttgaaatccttataaaattttgtagtcccattgtagccattaccactctcttttgcacatgagtatttgaaatccttaattcgaaaactatatattttacttgtataccccaaccgaaatctaatttctattcgatccacacccgacccatctctcccaaacggatatttctttagatattccaagtttcaacatttttctcttcaatttttgaatcttttcgatttctcaaactctctctctctctctctctctctctctctctctctctctctctctctctctctctctctctctctctctctctctctctctctctctctctctctctctctctctctctctctctctctctctctctctctctctctctctctctctctctctctctctctctctctctctctctctccccgtgcgttctcttctccttctcaacatccaataaccctaatctcttttctcagaatcttattgttctcctacttccaaccctaactgcaactgacccccatgccacctttaaagaagaaaacttggttaaagaggaagagatgagtagtaacgaatccaattgatggaggaacaaaagcaacgacagaggagctggcaacgaagcaatcgatggaggaacaaatgcaacgacggaggagctgacaatgacgaaggagccaccattagggttgtcattgaggtcttaaaaccatgtgctttttaataatcgtgttgactccacctgctgattaatgagatgatgattttccgagaaataatctcagcttttgtgaaagaaaaaaaaaagaatcaaacctaatttttggttttcgagttgaaccatgtaaactaggtgatgttcattcttaatgggtcacaaatgctagatataagccctgatgtcttttttaaatcgggataaaccggtacgtttgggtcactcaattcacatgttttagatggttatttgtggttttctatccggttttatctggatcaatatgtttgttgacggtactactctcaagccaatatctcataaacacaaatcaagaactcaaacaaaccataagaaaactcagtagattgttttatttactcttgaaaaagaaacataaacaaaattgggaatttacttttcacataatgaaccaatagcaagtaaaaaacattaccatcatcatctacatatatctccccatcttaattctctatagcaaccctgcatttatcagaagaagcattcctacaaagaacctataaaaacttgtgtagagaatcaaaaatgaaagtaaaaggtcagaccgaggttgtgatatcattgtatttaggacgtggtcgatccgtagatatcacttcttccattgcttttctcttattactactcaacattggttcaagttgttccgattcaacttcttggtggagaggcaaaatgtcaatcactaatgactcttcttctatctccggtttagaaaccacaatctcttctatggcaactggtttctcactttctttctttaactttgttttcatcatatgaggtttcaacttggtatgatcaactaactttactggtttcaagaaaaactcttcagctcctttttccaaacatctgttggaagaaaccaccacaagtttgtgcatagttcaaagacttattcaaaccaaagaatcaaataatacccacttgccaattaaaaaatcaataagactcatattaatgttaaataaacagagctcttacctggagattcttgtaggaacgttctcagatgacattataactacatgtatacttctaaatgctgctgattcctatacacaacaatcatgtaaattaatcagaagaaaataaaactgaagggtttatgttgggcttgtccaaaagctgaccataataaaatggacatcgacagtccatgatttttaatattgaacttatgaagtattcaacttatgtttttaaaaagttcttaatattgaacttatgaagtattgaaattatgtcacgtgtcattgtgttaaacaattaaaacttaagtatgaagttttgaataaatgtattcatgatatccatgtattattttggactcatggacagcccaatttactatggttctttttgaatttggtgtaatttgggtctggtcctatttgggcttagaccaacaatgtccaaaaaatggggttgtaatggacagcccatttgacatccctagccatcatcgacgaagcaaaatccagcaattgagagaggaggagttgaagaaccaatcctgaccataagtccggttttagagtcagtggaacaagagaagtctaacaagaatgaggaagaaatttctgagaaggatgacgaagaagagagtgaataagaagagagtgaagaagaagagaaagaagaagaagggaatcgcgacggaggagagtcctccaatgataacactagattttaacctttttaagcccttgtttttcatgcatttagcttagtttcatgtctcttttcatgcattcttagtctcttttctttcctttgcacattttgcattgcattgcattgcatacttgcatttggagtgttttacaggtgaatcaggtacttttggactcgacttggaggtttctagcacaagggatagacaaactcgatttcgtgggatcaaaggaaggacttggagtatactcggctttcttactcggctggagatcgagtggagcacacaagggagaagcaaagacgttactcggccaagacactcggcttagacccgagtgatgcacttgaggaagaagggaagcttctcgaccaagccactcggcctagacccgagtgatgtgaccaagaggaagccactcgacttttctactcggccaagacccgagtgatgcagcgccgacattcccattttgtcttttccaattagggtatcctaggattgcctataaacagacctcttatgtttttgcccaaaatatctttgcttttatctactggatattagggttcttatatttcttttgcattttctggttgttgtgttgagaatttggatttgatttcttctgcaaacttgtttatcttattaagatctatcattttctaagtttataatgatttatgagttttatgaattttctgggttttgttctatgatgttcttcattgttcttgagtagtcttttcagatttcttgaggatgagttaggtttaggtggattcctctgttctttagctagataagtttataaatgcataattccctactgttttaggagttcttaatgctattttctttctgatcaattgaaaattgatttcaaactttctccacctaaccagtgcttgatgaaatgtctgaaccaactaatttcagagatttgtagattctagcccaagaccttggatgtttagactgcttattgactttaatagattggggtttaaagcctgctttgttaagtttcatcaatgaaaattgagattaggaagtgataaagttatgagagtcattgtcacgaaagtggattgatttggttttgaatctattgtctagggatagcttgattgagtttgttagttagctaatggattgaggagtccactaagaccaattaccccattcttaagagctctgtttcgttttattgtgcaaaactcgtgtttttagtactctgttcgtctcgtgcaaaattggtgtttttagtattgtactcgacctgtttagttgtttgctcgaccgagtgcttgacttagtgattagtttactttctgctcttgctatttgagttctttattttctgcttagtatagttctgtttctgaatttgatttgcatgttaacctgttgcttaggtttagtagaaacacaccaaacctattcactcttggcttaacttagtattctctgatcacatcttgattgatagcaattacacccatttggattgacaccttaaatgatgcaatgacataagatgcatttagggaattaacacaccgaaaacccttgtatcaatttggcgacgttgtcggggattgatagtaggatttttcacatgtgtttaaatccagatgatcaattccctaacactatcatgtcattgtagtatttagggtgttaatccaattaggtgagtttgctatcaatcaagatgcaatcagcatgtactaagtcaagccaagtctagatgaggtgagttatctaacaacctaagtgatcatgaaagaaactaactatactaagcagaaattaaagaacatgagtgataaaagcaagaagtaaactacacaccaagaactctcaatgcataaacttaaaaaatgaactaagtagaggaaagtaaagatgctcgaccgagtatgaacatgcagagagtaaacaggtcgagtaacaaagtcgagcagaataacaaagcagagcgatcagataaactaaactgaacgagcagaagagtaaataacacgaaactcaataaatctaagcgcaacagagctcttaagaatggggtaattggttctaatagactcctcaatccatttagctaactaacaaactcaatcaagctatccctagataatagattctgaaccaaatcaatccactttcgtgacaatgattctcataactctaccacttcctaatctcaattttcattgatgaaacatagtaaagctggctttaaacaccaatctattaaagtcaataagcagtctaaacatccaatgtcttgggttagaatctacaaatctctgaaattagttggttcagacatttcatcaaacacttattaggtggagaaagtctgaaatcaattttcaattgatcagaaagaaaatagcattaagaactcctaaaacagaagggaatcatgtatttataaacttagctagctaaagaacagaggaatccacctaaacctaacccatcctcaagaactcggaagaacactactcatgaatagtgaagaacatcatacaaaacccagaaaatcataaaacccaaaaatcattataaacttagtatgcaatagatctaagcaagataaacaactttgtagaaaaaaattattgtaaaaacttaaagattcaacaggaaattaaaggaacatatttagggttttcacaaaagaggctagaacaaaaggaataaaagaggaatatccattaggtaaagggaaggggtctatttatagcaaatactaggttgttctaattcgctagacgacaaaatagagaggcggtttggtcccactcgacctaaggtcgagtggtttggtcgagctggtgcaaatcttcaatattcatattttcttcacttactcgacacgcaggtcgagtataaaggccgagtacaacacaaatcttcaaaaatggctcctcctgcacattctgttgtaattgttgcagtgccgaaacttctgatgcaccactcgaccttatcccgtgcgtagatctcgagcatagcttcatttcttcgcgtggcatctttttggtttgaattagtattctctgatcacatcctgattgatagcaattacacccatttggattgacaccttaaatgctgcaatgacataagatgcatttagggaattgacacaccgaaaaacccttgtatcaatttggtaccgttgccatttgggtgtttttcttgttacatttaggatttctgagttattaagatcaagttctatttctttctttctggttactcacttggttcttcatttgcttgtttttgtcttgcaggtactcatactcgactagcacatcgagtacatcaaccgagtaagatcaaaacgtatgcaaactcgttctcaaggttctagcaatctcctgtggtatagagacgacatcaacagggttcagcgtgaacttagagaacaacaagccacttcaaacccggtagtaatggctaatgagacaaatgctaatgagttgccagagcaacattggtgctggtgatgcacctagaaaccaccatcagagagctggtattgtcccacctcctattcagaacaacaacttcaagatcaagagtgatcttatctccatgattcaaggcaacaagtttcatggactaccaatggaggacccattggatcatcttgataactttgatagactctgtagtctcaccaagattaatggagttagtgaggaaagcttcaagctcaggttattccctttctcacttggagataaagctcatctttgggaaaagactttgcctgttaaatctatagacacttgggatgattgcaagaaggctttcctagccaagttcttctctaactcaagaaaggctagattaaggagtgagatttcaggattcaatcagaagaattcagaatcattctctgaagcatgggagcgcttcaagggctacaccacccaatgcccgcaccacggtttcaagaaagcctccctcctcagtactctatactgaggtgcttgcccaagattcggatgctcttggatacagcttccaatggtaacatcctcaacaaggatgtagctgaaggttgggaacttgttgaaaacctagcacaatctcatcggaattacaatgaggactatgatcgcactaacagaggcagtagcgattctgaggacaagcacaagaaggagatcaaaactcttaatgataggattgacaaattggtgcttgctcaacagagaaatgtctactacattacagaagaagagcttacacaactccaagatggggaaaatcttactattgaggaggtgagctacctacagaatcaaggtggctacaacaagggattcaacaactacaaaccacctcatcctaatctctcttacagaagtaacaatgtggcaaacccacaagatcaagtctaccccccacagaaccaaccgactcaagctaaaccctttgtaccctacaaccaaggctacaaccaaaagcagaactttggacctccaggcttcacccagcaaccacaacaaccttcagcacaagactcagagatgaagactctacctcaacaacttgtgcaaggacatgcttcatgttccatgaccatggataagaagctagctgagctcaccactaggattgattgctcttataacgacttgaacataaagattgatgcacttaacactagagtcaagagcatggagggacacattgcttctacttcagctcctaagcaccttggacaacttcctggaaaagctgttcaaaatccaaaggagtatgcccatgctatctccacagttaatacttctgccactgaggacagtgggattcaagaaggggaggttttgagaccaagatcaagacaggaaattgaactcgacttctttgctcggcttgtcgaacgagcacatgaccctagcaacccaatccatattccatctccctatgtacctaaaccagcatttccagaaaggattgcacagattgatgaaatgatcttccagaaacacaagatgatgttcatcaagtgtatcaaagagttagaagagaaagtacccttggttgatactcccaaggaaatgattatggaaagaccccaagaagctcagcaaatagttgaattgagttttgagtgcagtgctatcatacaaaagaaggtgataccaaagaagctaggtgatccaggttccttcactctaccttgttcactagcacccttagtgttcaacaatagtctttgtgatttgggagcttcggttagtttgatgtctttgtcttttgcaaagagattgggatttaataagttcaagcctaccagcattcatcttattctagctgatagatcagtgagagtgcctcatgggatgctataagacttaccggtaaagattggatcagtcgagattccaaccgactttgtggttctaaagatggatgaggaaccaaaagaccctctcatccttgggagaccatttctagcaactgcgtgcgctcttatcgacgtacaaatgggtaagatcgatttgaaccttggtaagaatctccatatgaattttgatattgctaagaagatgaagaagcccaccatagaagggcagcttttcttcaatgaagaagaaaatttagaagttgagttgttgagtgggttggaaaattatattccaaactccatttcgactcgccacctaggagagaccaagagcctcttatgatagaaggggaacctagctcagaggttgagactgagaggaactattttgatgttggtcctattgctagagagcttatggaactcagaaaacagtatggagctcaaggggtaaccattgaaaagttggacctcaagatggaagaattgaattatgctatcttgaagcttaaggagatgattaagggttaccccggtcctgagattgagaaatattttgaggaacctgatttgggagaagaggattataccactgatgaaaaggaggcttactttgaggaaagatccaatgaataccctacactccagctatctagagagaatgcggagtatgattcagactttgaggattcagcaagtgaggatgaggacttctcagttcctcttctcaatatcttctctacataaacattgtgagagtcaagcttagtgactttaaacaagctcacttgggaggaagtcccatgactatccttgtatatattgctttcttgttatttttaatatttttgtttaagtgttttagtaaaaagacttctgaaaattttcaggccacactcgaccgtaccactcggctacaaaccgagtgtaggcttcaattgatcaaaggcccaagactgaaccatactcgacccaaaaaactcggcccatggtcgagtatgggcctcactgttaaaaggcccaagaagatgcaccactcggcctgaagccgagtaagaagaagcccatcaggcccaacactgtactcgacacgcgcgtcgagtatgtcggccgagtttacacgtgcgaggtcaagacaattcatatttaaatttgaattcgaattcacttggccccacacatcaaatcctgctccccaaagcccatcagagattcttctgcaaatagtgaaagcatgtgcccttgaccaaatgaagggtgaagatttaaggtgtttgaagggctaggattcaatattcttgtctataaaaccacactcaacaagctaagtcacttacactctctctttgctcaataatttcgaattttacttcttctctccaaacatttcaagattttactctcacttctctctataattcgcagaattgaaccataatttcttggtttctctccatacaaaccttttcaaaacctctcttaaagcctttgatcagttttaaacatcaaattctcttctaatttgacctactttgggttattttgtggtgactatctgcagtagctcaatacaagatcatggatcctaaagaatcaagaaggagagcctctgctcgagctgtggctagagggtttgctatgataaatgagaagggtccggtttggaacaaggaagctgtgagtcctggctttactcggttgacaggccgagtacagtggccgagtatgaccccggagtcttctatgggtcgttctacggctgctagagaagaaattgcaagaggcaagagggtttgggaagctgagccagttgcagaagaagaagtacctgagatagagagggaagcatctgaagaagatgtagtgttcgttgagaaggtcttaccagttcctgcaccaaggagaaggaacaacccaaggagaaagaaagagcctaccattgaagagcactaccagtacctcatggagatgagttttgaagggacaagatatccccatagacctaccatgcaagctttggggatatgtaaagatgttgaatatctcatggagatggccaagctggagacattctttacttacaagtgtgagggattcaaggaagagagctgccagttcctagccaccttgaagctccatttttatgccgatgagagagagaaggagctacataaaggagttggctatatcacattcatggtgtatggaactcattactctcttctgattaggtagttggatgctgtattcaagttccccaccaagtatgggatccgccaaaacttcagcaaggacgagctccatgatctatggttaataatagctggttcacttccctacaagtcatctagggccaaaagttcagcgataaggagtccggtacttaggtatctccacctttgcattgcgaatgccttcttcccgaagaagacaaccggccatgttaatgagggagaactgaagatgcttgatcttaccctatgtttcattttggggcacacaaggaaggggatagagatggaaggggatagggctgatacatctctttcagtggtgttgattgatcatttgataagctt

SEQ ID NO: 187 - DNA, 102249 bp, Arabidopsis thaliana
gaattccagtttatctttcccgaaactgaagggaagtttttggcaagtcgaatccttgttccttaaccctaatatatcgtatatataagcgttttaaagctccaccgaaattaaaagccgaatccattatcaatttgagacttttggtgagtttcttagacccattttgcctcaatgcggatttgaatatttgttgatattttgttatcggattttgtggttgtttaggttggttatggcttctattgttggttctttagtattgagttgttttcagccttcttcagagttctaggtaagcttcatcttctaccttttttcaaaaattttccatggaatgagctttaaagctctttaattgttgatctcttttcacaaagaattaggagttgatctataccttgttagaaatctctcgttcgtaagaatccaacgccactgacatattatcaatcggaagtcagagtttatcggaattcgatcggtaaatatttctttttgttggttcatagtcaaatcgggatttatttacgctgcttcttaaggttttaaaaccgattcttgaatgttctgtctatggagaatacttgtttgaaatctaatttggaattggttgagttttgtgtttaagttgttagtaattaggaccggttcaactagttttaaactggtttacgcgatactagaatacaattgaacttgaaattagcttttggatggtatatagtacatatgtttttgattcacggttgaatttacacgaattaattggtgatttggagcgtggatagaattgtcttcggttttaaaagctttttcaggtgagttttaactgccttattagttattatacatttgtataatattttgggtgtatgataaaaagaataaatgaattatttgtatattctgaaaatttatttgcttgctttcataattaatttggttataattataataatcctactatattatttgggaagtacattttaaatgtaaccttaatttttgtaattaattacatgacaatgccattagaaaaatttaatcaaaaacaaaatcctttaatgacgtcattaaggttaccaaaatcatttaactacaatattcatttcttaattatagggcttattgtatctaaagacggatcatcaaagatttcctaaacagaagcaaaatataccgaatattcaaatatctatctgttaccaaattataaacaatatgaaaatattaaattgttttatgaacttattcgattataattgcattcccctattaaatgaatatggtgcattcatatgttattagctaaaatgttaagattataattcagagacatatcataaataaaattaatattaataaaataattggctttttggcaagacggatttggagggacgaatttttaaatcaacattaataaaaaagtaaaatataattaatccaccatttcaatacaggttaaatttttaatttattattttattaagaccacttattaaacatatcaaatcattctaatttagaaaagttatataaaaccaaaaacttttatgtggtatgtataatgttactatatataaaattaaactataaaatataaatgtattagagaatgatacaatttgcaaaacttttatatataataaataattcttaaattttaaaaattactatttaaaaaaaaattatgggatgggcaaagaaattagagaacaggttttattttggaattgggttatatggtgaatgtatttgaatcaatatttataaaattttaaaatattattaatattctgtttaataaggattaaaacttcagttttttaacaattgtctcattgattcgtcgtataacgttacttaataacaattataaactgtaaaatataaatattttataaaaataaaatttgcaagttttaatatatattacctttaaaaaaaaaatcgtcccgcggtataccgcgggttaaaatctagtaagatatgttattctgttaagactatgtataattgtataatatttgggaactagatattaacccgtggtataccgcgggcctatattttcattaaataaaaaataatagatttttttttaggatgatctataaatttgtgctattgtttgatttaaatgtatgatacaccgtgagacaaaattttataactaaaagattaaagttttaaagtgtatttgtttattttgttaagtatttaatattgtataattgtattttgattattttttctcatatttcacccgtagtacccaatcccatattaaaatcgactcaaacctatcaattctatgatttcacctgtaatataaagtttaaatatttataatgtttaacttttttataacagaatcaagatgcgttttaacaaaaaagttttacgatgtatttattttgttactattgtttttttttgtttagtatttcattgtatagttatatttttattgtcattctaggatttcactccttgtatactatcgcatattattatcaacccaaaccagtctattctaaaatttcacccataatataaagtttaaatatttataatatttaaacttcttataaaagaatcaagatgtgttttaaaaaatcaaaaattttaagtgtatttgttttgttaattttgtttagtgtttaagattgtatcctcttattactaaaagagaagtacaaattgaatttttgtcgaatttgtcctcaattttgatttcaattttggattttgttcttcatgctaaagggtaaaattgtccaagccaaaaacataagtaaaaaggatccgctttttattaagtagggtgtgttatgtttaatgggcttttgatcacaacaaaacctatatattcggtggaccatcaaaaatgcaatcttagtcaaaatctttcacggaacacgtttatttctatatctcaacaatatttgtggaagtgatacacgcatattccttcaaaatcttctgcatattcaattacgattgttataatcttcaatcatatattcattctcctcaataatcagtataaatccacataaacgagcatattcgtttattctaactcctcattgacgataatacattccataaactagaaaatcatataaacttatactgttaaatctagaaataaccttaatcaactaaacaatattaaccacttatctatagatggccaattattatgaactaaaccaatttcgaatcattagtcattatccgatctttgatttgcaacttatactccaagatactgacgaatatttttgaaatattggatccagcaaccttagcctccttcaccactatatatatcaaagccattctcatcacaattcatcactcaaataccgcattttctagcaactaaatcaaaacaatggctcaagcaattgcttaccttgatgacatcaagccctacaaaacgtcttggagagtttaagtctgtgttcttcatacctggaaaacgttaacaatgaagtttggtgagactttcgacatggttctctctgatgtgagagtaagtattcatgttatttctacataaattgacaatattcccaaataaaaacgtttattctatactaatattttatgctttttaatgtaagggaaagaagatccatgcctcagttaagagagagcatttgaacaggttcgagaggctcattgttccaggagagtggagggctattgaaaactttggattgacctatgcaacaggtcaattcaaagcaactgatcatcgttacaaaatgggattcatggctcaaacccgtgttgtgagaatcgatccattgtcagattcttattttctgtccttgactgctttcaatgatgttttaaatggtggtctcaaccaaaactacctgattggtatgttttttgcttcttatttcgtttccatttaaataagaaactttatagccattacgtttttttgaatctgtgattcgtttttgtattagatgtggttggtcagatagtgaatgttggtgaaatggagactattgatgtccacaatcaaccaacaaagaagattgatttcgaactgagggatcaaaagtaagtttacttggatatgagtaatagaatacaaaatattaagtttgaattttttctaataattctattattaatttagggatgaaaggttaccatgtactctctggggttcatttgctgaacaagttttcactgcctgtgaagctgctaatggtgaaatgatcatatgtttggtcagatttgccaagctcaagacttacaaaggttatataggaagttatatagaatgtatatgttggctaaattgactatatcgtgaaagtttatatatatatatatatatatatatatatatatatatatttgtttacggatttaatgaaatggatccttttgttttgttttgtagatgttaggagtatctccaatgctttcaatacatctcagatcttgatcaatcctgatctccctgagattctggaatttaaagacgctttaccaaaagattgtcttgctcttactctcattgagtctaaaccaaagtcgaaaattgatgagtttcctactggggatttctatcttcagtttgctaaaaagaccatcaaagaagtctctgagatgtttgatgtaatatcctgtttctttatctattgacgttggtttagacttatcatagtttttaatcgtgcttataattgtctaatctcaggttggtagggtcaaggttctctgtacaatttatgacattgacagggattggtcttggtactatattgtctgcaagaagtgcaataagaaagtgactaaggtagtcatgacttccttgaaagcacagttatggtgtgaaacttgccgagcaccaatcaccaatgtgcttgcaaggtatgtctcataatcttgatttaatgaaaaatagaaagatttttgtctgtggcttattggattaaatattgtgacctatacaggtacaagctacatgttaaagtgatggattcaagtggtgagatgaagctgatgctttttgatgcaatgtcttctgagattgttggttgtccagcaaataacctccttgatggatctttcgatgagattgaggacccagacatccttccagattcaatcaagaatcttatcggtaaaacttatcagtatctggtctgtgttgagaatgagaatgtgtggaatgaactcgatacttataaggtatctagaattcttgcttatgatggtcttggggaagaagagataccagatgcatgattcaattgatcaggtatggattattttaaattgtttgtttcttcataaagccactaattggtaagaaaactcactaatatcactctacttatagactcagtgtagcctcatgctaacctactctgaagagccttctgaggctacaactccatcttcaaagaggagtagtgacacttccatttcacctgctgataatttttcaacaactaagaagctgtgccttgactcaatcaagattgtgaagataaaacaggagatggttgaaaagaataatgaagctaaagtcgttggtgagaagctcaatttctgaatgggaagcagaagagggagtacgcagatgaagttaatggagttaatgtgaagccgatggagtaaacataaaagtagtattcatgttgcatttgcttctgctttgttgttttagttttaataagtggtttttctttactgtttccacatttgtttctgttttttaaatgataattggttttccatttggtttttaatcttcttagttcctcaaaatcattgaatactaaactcttatcacctttcattatctaaacaaatgaagatgtgtcgttctgttctaaaacaacaatctctctcagaagaggaatcaattgtctctgttgcaattttagtaattggcagcatgaccctttgagttaacaaagtttgatgttattggcaaagtttatagaaaatgcgttataaatctaaatttgcatacggtatagagttgttgttaatagctctagattctctacagcaactaataaagattggatgaagatgaggaactaacctttataatcgttcctcagtcgtcagattgcaatcttgattagattgtagactaagcattaacctgaaattaaaaaaacaacaacatcattattagatgcagagaatataatagatacttaacaataatattctgatttggcaatcaatataacaataatatataattgcaatcatattaattagatatcttaacaaaagattatataatcttcaagtcatcgctaagttttattttaaactctattagttagaaaattatagttctatcgttatacaaacaatagcttaatgaagttaagaagtgccttggttgataaaggtgaaaaccacaccactccatttgctaagaggaagtgttcatcgagcaaaaacagtttctatagtcaccacaaagctaaatcatctggaaatgggtttgttattccactgaaatcaatatttgctcggttaattacggacataacaaaatccaagcctatggttttagaagagtctctttgtcctacatgaaaaattccagcacaatcttatacatgtatatcattatattctacagtatgctaattgatttatccatgtagttaagacttcactactttgttatatgtacaaaatggcttatatgttttttttccaaatgttcagttgatgagaacacctatctaacacctgtttgtgttagacaatcattgtcttcgcaagaacaatactctttatgcccgcggtccatatcaaacataacaaaatctacttctgtggttttagaagggtctctttctcctttagctaaaaatctatcagtgactgatataggtaaatcattctctctcgaagaggctaaaatatagttctatataatattgactttcgatattttcatcaatgttgtttgtggcttctcttaattttttcaggctcaattgatgagaactcatatctaacacctgtttgtgttagacaatcattgtcttctcaagaaccatattctttatgctctgtgccaattacgccatctaatgtctctcaatgccaggaatatataaattcttctggtatgttgatcgacatactatttttacaatgttttattggttaaaacataacttatgctcaaaacgatccttataaatgtatgtagaacctcttgaatgtttaacaactgatggatcaatattatctgatataccaattaaacagtcaacttcaatacttggcagcaacgattttctaacttcaatcagatcagaaacaatcaaatgtgagcattatttgtctacacccaatttttgtatatgagttttgtttagatactattgtttttcattctaacataattacttatattctgttttcagcatacagtgcaacagaaaatcatccaaatataaagactgtcagaataagccaatcttattctgaacttggttcacaaaccttcttatccgacataagaagagaatctactaaacgtgagtttctgtttgctatagtttctgactttgagcttttattcatcttaattctaatatgtaattacactctaaatctatgttctttttttgttagattccattaatcaggtttctaaacttgatacactgaaattgaattcaaatactaatagaactaagaaaagggttctaggagacatatcaaaccaacctgatagaagacgacgaggtgagccacttaaaagcagaattcagtattctacacaaaacaaagaaaatgtcacaccaaaccgtgagtatacaattatccaccatcacgaaaataataatgattgtattctatcaatattcatatgattgcagacctaagttattcattttcctgaacgttcaacagtcaaaaattcacaacagccggataaacaaagaaaaactaaaaagactaaagatttggatgactgtcgtgtaaatctgtttgagtcaatccctttagatggtaataatcgtgatttatagatttgttctttgaaatatgaattcgattttgactaataacatattgttgtcaaacagaagaagatatttctgatctcgaacaggaatatgatgttagtagtcaagaagatttggcttctgatagcagttctggatatgaaactgaaacctctgttgaaacacatgaaacaatgcatccacagaatcaaagggcaccgtgtattaaaggtagaaaagatataagtcctaagcgaagtagatatactagaggagcacctatccacaggaaaaggaaaacaggtttgtatgatcgtttaattatttttagttttagaacgaacatatgaataacatttttaaaatcgaatttgatttgtttttttttttttgcagatcctctcattgacattccttatttagatcacggtgatccaaaatggaaatgtcaatactgtggtgctatgagttggtatgatgagcgagtcaacaaaagaaggaaaagcaagaaaccaaaattctctctatgttgtcttcagggatcagttaaattgccatttcttacagaatcacctgagcttataagagaattgttaagttgtgatgatgcactaagaaggcatttccgtgagaatatccgagcatacaacatgctattcagtatgacttcccttggtggtaaagttgatagatctaatccacagggaaaaggtcctaaccagtttcagctacatggagccaattatcatttgattggtagtatgttacctggtgaaggagattatgctaaattctcacagctttatattgttgatactgggaatgaagtggaaaacagatctactgtgatgaggtactttttatattttctattcttacattttattgttcgttgtgtattgaagtttatggtattttcactaatatgatttcttaacaattctgtgtttagcaagggaaagaatccgaagaaagcaacattcaaaaatcaagtgagaaaggatctcattgaaaagctcatcagaatgttggatgcttgcaatccatacattgaaaatttcaggctagcaaaatataagttggatagtaataatggggaaccattttatatgcaaattgttagtgatagggtaggaaaagatggcagaacctattgtaaccctagaacgtctgaagttgcagctttaattcctggagactttcgtcctaaaatgcatacacgtgatattatcgttcaagataagaaaacaggacaactatcaagaataagcaaagttcatccttcttatgtcccaatgcaatatcctcttatttttaattatggtgaagatgattttagaccaggaatacagaagggatatacaggtagaacaggaaaacaagcaaacaagtgtataagtatgaggcaatggtatgcttttagaatacaagagagaactgatgaagcttagaccctactacgttcgaagcgtttgttccaacaattcttggtagatggatacacaacaatagaaagcaataggctggcctatattaagtttaaccagtctaatctcagatgtaagaattatgataccgttaaggctgcgagagaagctggaaacacaaacatgagtgaacaagggaaatcaatccgaattccacaatcttttactggtggacctcgccatatgttgaactcttactatgatgctatggctatatgtaaaatgtatggtttcccaaacctgtttattacatttacatgtaaccccaagttgccagagataactagttactgtaaagagcgtaaacttaatgctgaagatagaccagatgttgtgtgttggatattcaagatgaaacttgactctcttatgaaagatttaacagaagaccatcttctaggcaaaactgtaatggtaattaattctatcatcttcttcataagtttagattctgtttatttgattccctgttactagaatgaagagagtttaaaatcgtttttaatatgcagctatgtacacagtggagtttcagaagagaggactaccacatgctcatatactcttattcatggataaaagttgcaaattcccaacatctgatgatattgacaacatcctatctgctgagattccagataaagctaaggaccctaagttatatgaagttgtgaatgattgtatgatacatggtccatgtggtgctgccaacaaagagtcaccatgtattgttgatggtaagtgttccaagttttttcctaagaaactggttgagcaaacaacagttggtaaagacgggtatccaatatatagaaggcgagaatctgaacattttgttgaaaaagggggtattaagtgtgacaacacttatgttgttccttataatcgtatgttatcattgcgttatagggctcacataaacgttgagtggtgtaagcaatccggttctatcaaatacttatttaagtacattaataaaggacaagatcgtgtagctatagttgttgaacctaaggacaagacttctaatatgtagactggctcagaaactcgcagcaaagaaaaaagtaaagacactacaagaatattgagtatttatagcactataatatagcagttaaccatgttctgctataatttataacccagctaaacttttatagcgtttggtaatttcaaaacgctataatctcgtactcgggaaataaaaaatgacgcgggtcatgtttttggatttagggttattgttctatagcattaccattaattaaacgctacctaatgtaatagcgcggattaatttttgttgcctgccgaaacaaaaaaattagccttaaaaaattctaagtgaaaaaacactattcgactctttctcttcctctcggttcgtgttcttccctattcgtgttctgctctaatcgattcttcttctctctgtctctctttgtgttcgtgttcttgctcaacacagctacagagttttgttcaatctctctcgacgactctcgctactcctcagcttctcagtcacatatctgtttcttatttgagaaggttatgtgccttttctaatcgatttagggattgcatgtccaatttttcttgtttgagtttctatttggggtttaaatcagttttagggttttgttttcaggttctcagaagcttttggtagccgtcatagacgacgataaagaaatcaaagattacttcgattgcaggtatgatatacttttttacttggaatatatctatctatatttgttttcgtctacaattttactaatatttttcttactaaatagatatgtgtcagcttctgaagcagtttggaggatattcaaatttcccattcagtatagaactacacctgtaatgaagctttcatatcatctaccaggaaaacaaccactatgttttgaagacactcagaatatagatgaactttcagaaaaaaaagcaaacgaagattttatgtttattggttttctgaaactgaatcaagagtgtgagtttgctagacagttcatttacacagagattcctccatatttcacatgggatggacagaataagcagtggaagcttagggaaagaggtttctatataggaagaatgaactacgcctccataaagatggaaccagaatattacatgaagatacttcttgggatagtatgtggtccaaagagtgatgaagatatcagaacatacaaagatgttgtgtatgagacatacaaggaaatattgatatattgatactatagtcgaaggaaatttttgcatgtttggcacgtggacagacatacaaagatgtttttgcatgttttgcacgtgatattctcacagacgatcaagcatatattgatactatagtcgaaggaaatttttttttttggggatcatcttcagaatttattttctatgttgcttctggataaatgtcttgctagaccagagtatgtgtgggaaaatgttgtggaattttaatcgaagacattgaaacaaagaaaagaaagcagtccgacaatccaggttcgttgagatacatttattttgtatagttcgttgctttatttttctgttataattaaattatcttcttctctattttcaaggttagtactaagtgatgctgagaaaataaattatgctcttttagagatagaagatatgttgttgtgtaatggaagtactctagaagactttaaacacatgcctaaacctactaaagaaggtaccgatcattcaaaccgtttcattacagaagagaaaaattataacgtggaaaaactgaaagaagatcatgatgactggtttaataagatgacttctgagcaaaaagagatttatgatgagatcatgaaagctgttttagaaaacagtggtggaattttttttgtttacggttttggaggaaccggtaaaactttcatgtggaaaactctatctgctgcagttagaatgaaaggtttaatttctgttaatgtcgcttctagcggaattgcttttttgttgttacaaggtgggagaactgctcattctaggtttggtatacctattaatcctgatgatttcacaacctgtcatatagtacctaattcagaccttgctaatatgctaaaggaagcatctctcatcatatgggatgaagctcctatgatgagtcgttactgttttgaatcattggatagaagtctaaatgatgttattggaaatgttgatggaaagccatttggtgggaaggttgttgttttcggaggggatttcagacaagtacttcatgtgatacatggtgctggtagggcagagatcgttttagctgctttaaattcatcttatctttgggaacattgcaatgtcctcactttgacaaagaatatgagtcttatgtctaatgatttggataaagataagggagagaaaatataagaattctctaactggctccttgccgttggtgatggaagagtttcagagccaaaatgatggtgaagttctcatcgatattcctgaagagttacttattaaagatgccaatgatcctattgaagctattaccaaagcattttggatacctcgatttgtcgcagcctaataatgatcctaaatttttccaagagagagctatattgtcatcatgctcgagaaacttaatggtaagctaagtttaaaattgccgtggactaagactattttgttgtaagaattctaacaattgttttcaaacacgtgaatcaattacttatttaagtgcggatagtattgatcctcaagatccagcgtcattgaacaatcccgtcttcacaccttatttcctcaatagtataaagctttctggtttgtcaaatcacaatctcactctgaagattggtacaccggttatgttactaaagaatattgatccaaaaggtgggctatgtaatggtactagattgcaggtaacgcagatgggtaatcatatactagaagctagagttattactggagatagagtcagagacaaagtgataatcataaaagcacagatatcaccttcagatacaaaattgcctttccggatgaggagaaggcagtttccaatagctgtggcttttgctatgagaataaagaaaagccaaggacaatcactcaaagaagttgaaatttatcttcctaggccagtattttctcatggccagctatatgttgccttatcaagagtcacttccaaaaaaggattgaaagtgctcattgtggataaagaaggaaacacgcagagtcaaacaatgaatgttgttttcaaagagatctttcagaacctaaggggttaggaattcgtttcattgctttggttattcatatgatgttttgtattgttgtttcaaacaacaatgtttttatttctagacaatcgtaaaacagatttcatttctagacagcataaatcatctatttccattaacgctaaaaacaagaaagctttattcaattataccttcagtcaaccaaatctaccaacgaaaaacatggtgtataaacttgattgaaagctgatgtgtaactaaccttatatatatgagtattgatttggttgtcgacgatttgtacacttaaacgccactgagatgtatgaacacctatgaacaacaaatctcaggtacctatgatataatatataaaccaattcatcatgtcaattgccttataccattcctatatggaatcattaaaaagagttgcaaataagacatgactttataagattgtttgtattaatgacagctgctaaattaaaaatatgtgaatcaattcattggtttagctctctcctataagggtagaaacaaataagaaacatgcatgttcccgagtcaattgaaatgtgtttgttcgcatttaaaggtgccgtatcacagcttatttctgcacataaatcgtgaaaaacaattaactagcaatgttataagacaattaactggctaaagtctatctctttcttagctactctaaacgagataaagcagtacaaagaggaaaccaaactacgagctttgcaacatataaatttcgaaattagtgctaagggtaataaccaactcaatcaaactaaaatctaagaagtcatgtgtattgtcaatcttgatgaacggattggaaaactcataaactattacaataccaaaaccataaccaaatatatattttccagaagattgaaaaatacctgaactttgatactataagagaaatttcggatggttttgtagtaatcagcaaaatacgagtaacctcagcactaattttaatcaaaaaatgaataaagtcaagctctttcatatattcacataactatttggttagactaatgagacaaaaccaaactaggagctttgcaagtataaatttcttagttttagtaaagggtattcaccgattcaatcaaactaatatctagaataccgtcaagatttttgtcaattgaagtaactgattggaaaacacataaaccattgccataccaaaaccataacctaagaaatttgtgaagaagattcaaaattacctgaactttgataatgttagagaaagtgtcgattgttttgtagtaatcagcaatcaattcaaccagagatgtctgtattctctcaaatgctctgattctatcggcttcaacattgtcatgcacccattgtagctcaagagatttttgtaaaaaaatcattggaagttgaacagagatttgtaatgtgggcaatcgctggtgacttacatttttggaagacacgaatgctggtatacgccaaaccaattgcaaaaatcggtggtggaagatcaatctgacgataatggattgaatgatttagctaaagtgagcattgctcttccgtcgtcagctacggatgtggtgaagaaggtggtgtttgtgaggaggaagagaaggaggagaggcgttggagcctccattgattagagaacacgacagtcacgtagagaggaggaggatgaagaaggaaagaggaggaggaggaagaaggagattagtggtgaaaaagaatctgttctcatctctttttttggtttattcgtttgtgtgtaaaatcaaaatcccgaaagaacaaaaaaaaattatacctgttttattaacatgttctttaaagacaactcctgataaatattattgtctttgttatggcaaaaataaaaaatatatcatactacataaaataaaaaatatatcatactacatatggtttttacaactcttataatcaacggaataattacaccatctaccatctatatatacatttttgcagccattttagcaaataaatcctggacttggacttatttacgatctaatgccattaacattaaaaaaaatttgtaaaataattaattttactttaaattctttatttaaattgtcaatcacattatcaatcaaatttaatcccaacaaacttcaaatcaattccttaaaattagcataaacatatttgttaacaatattttaaaacaaagttttttgttaaataaatattattcttactaaacgttttttgtttaaataaataaattttgtatttgaacttatttacaatatcatgtcactgacattaattatttattaatgaaaatatttaattaaagatttaaatcttctaaatcctttcttttagagttattatgtcattaccttataagcaaacatattaattttttaaatattattatttatatatttaaaatttataaaacattattaatatttaaacttataaaaaatttaatatatcacaatttgtaacatcattatataatatgtagagtttaaaaaaatcttaattttttccgtcatattttatgattcaaaattttaaaaatgaatatatattaaccaattggcaaaaaatgtgtgggttcaacgtcccgcatcgacaaaaatatatagacaatgatttataaacatatcataaataagatcaacattaatataaataaatggtttttttacgggacgggtttggcgggacgggtttggcaggacgttacttaataacaattgtaaactataaaataaaaatatattatagatagatacaatttgaaaaaaaaaattatactaactttgaaaagataaattgtttctgcggtacaccacgggttaaaatctagttatattatatttttgtaactattttacttatatcaaatacacattaagtaatttatacacaattttaaacacaataaaacatattcttctaatctctaaatagtctccatactaataaaaatttccaataattatttatacaagtctttacaaaataaatatatgttaatattttgtgatataacatacaatagtttacttgattaaaaactatataaactctatcccgcgggaaaccgcgggttaaatcctagtaagtatattatgattgttaattctagggttttctccgtaatgtaccatctcatgttattatccacccaaatccgtcccaccatataaccccgtcttgagaaattcaacataattttgtcattttcttataaatttcaaatatttataaaatttgaaacttaaaaagaaattaatatcgactcaaacttcatcattaaattttgattgttatatctaggatttctcctgtagtctaccgttctgtattaatatcttttatatatatttataatgtttaaatttcttgtaaaattcaatttctaattttttgaaacttttaagagtttcaattctttaaaataaagaacccaagtaaaccggataacggttttaattttggacgcctgataaatcaagcttctggctcattcataatcgaaatcattttggtcttttttatagtatggctctgaaccattgtccaatttttgtaagcaatgtgggacattgtacaatcgtaatataccatcccatattattatccacccaaatccgtcccaccatataatcttgtcccgtgaaattaaacataattttttcattttcttataaatttaaaatatgtttaaaatttgaaacttgaaaaaaatatataatatcgacccaaacttcataaattgaagtttgattgttgtattaggatttctcccgtactatatcgtcctgtattaatatcttttatatatatttataatatttaaatttcttgtaaaattcaatttataatttttaaacttcataagctttaaaattataaaaagttttgaaaattataatatataacttttgataaagttaaaatatttctaatttttttaaactttttaaaatttcaattctttcaaataaagaacccgagtaaaccggataatcattttaattttggacgcctgataaatcaagcttcctgctcattcgtaatcggaatcattttggttctttttataggatggctctgaaccattgcccaatttttctaagcgatgtgggacattgtgcacattatttattcatcgattaaataatatatgtccatttttaaaaatttaaattacatcatatacataaaaaagtataatattttataatgtatatatattttatataaattcaaaataaataaagtataagattaaataaaagtaaaagaagaatcatatatttatgtttcaattaggttgagatgttttaggaaattagataaggtaaataacaaatatggttagtttacagatattatatttatattaactatggtaacgaaataataaatttcgtttttcattattttttattagaaaatggtaacttttttaagaattaactagattctgatccgcgcatacgtaagggatttcatatttaagaaatgtattggaatacatttttagtgaaagatattatagtgtataaattataatgtgcatagaaaagtgtgtaatgttatttatgatacaacaactaattttgttaattaatttatattatttctattttatttgtattttgcatagtaaatcgaatgttaaatttgtttcgatttgcggaataatatagagatatttagaaaatttgtgtatttttgttagtttgatgtatatacaaatttataaacatttgtgtattttttccgccaaaaaataatttcccgccaaaattttttctcgtaaatattttttttccagccaaaaaatgcttttaaaaatccttgtaaattttttaaaaactcttttaaaaaaacttgtaaagttttttaaaagctttggtagttgctaaaaactcttgtaaatcattttaaaacttcttaaaatctttctaaagtctttaaaaacataggtaaatactttaaaacccctttttaaacctttgtaaatcattttaagactttttataatagttttacaagatttacaatcgttttttgagcataagtaagtggcattgaatgatttataagggattttaaaagcttataaaagggtaaaacatgatttacaatcgttttaaagcataagtaagtggcataaaatgatttacaaaggatttaaaaagggttagcatggtttacaatcgttttttagcataagtaagtggcattgaatgatttacaagggattttaaaagcttataaaagggtaaaacatgatttacaatcgtttttaaagcataagtaagtggcatagaatgatttacaaggattcttaaaaagggttagcatggtttacaatgtttttttaagtataagtaagtggtattagaatgatttacaaaggattttaaaagcttataaaagggtaaaacatgatttacaatcgtttttaaagcataagtaagtgacatagaatgatttacaagggattttaaaagtgtttgtatggtttacaatcgttttaaagcataagtaagtggtattgaatgatttacaagggattttaaaagcataagtaagtgtcaaataatgatttacaagggatttaaaaaaaggtttgaatggtttacaatcgtttttaaaatataagtaagttgtaaagaatgatttacaaggatgttaaaagcttataaaagggtaaaacatgatttacaagagtttttaaagagttttaaaaggatttacaaagattttaaacctttgtaaatcgttttaaaactcttataaagtcttcagaagcattttttaactcttagaaaaaaaattgtaagtatttaaaacatttacaactctttttgaacaattttgtaaagatttacaagagtttttaaagggttttcttataatttcttttaaaatcttttaaaaactcttgtacatcttttaaaaccctttaaaattcttggtaaatcttttaaaacacttttaaaccctttaaaaatctttaaaaaactcttgtaagtcttttaaagccctctcaaatcccttgtaaatcttttaaaacccttttaaattctcttgtaaatcttttaaacccttttaaaatctcttgtaaatcttttaaaatattttaaaacccttttaaaattccttgtaaatctagttcccgccaaaaagaaaatttacgggaaaagtgttttctaaatttttttttggcgggaaatattttggcgggaaaaatgtttttgaaaaaaaaatttggctggaaatttttttttcgaaaattttggcgggaaattttattttggaataatttaggcaaaaaatattaatatttcattttgttaacctaaatcaatttacaaataggggtaaaatggtcattaaaaatttaaatagggtataaataaaaatggtaaatagaaaatggtagaattgaaaaggggtagtgtgaaaaaggcattagaaagaatttttgttaatagtatagatatgattctgacccgcacatacatgcgaggtttcatattttaaaaaatgtattggaatacatttttagtgaaagatactgtagtgtataaattataatgtgcatagaaaagtgtatagtgttatttatgatactataactatttttttattaatttatattatttatatttcatttgtgttttgcatagtaaatcgaatgttagatttgtttcgatttgcgaaataatatagagatatttagaaaatttgtgtatttttgttagtttgatgtatatacaaatttattgtttttgtttgcaatttgatcaattagatgatataatgtaaactttactctgcggtacaccgttgttcaattttgttgtaactaaaaattcgaattttaagttatagttgttttgtaaaatattgtttcttttgtttagtgtttaagattgtataattgttttaaaattgttaattctaagattacactcgtagattatcatcccgtatgagtatcaacccaaactcgttccaccagataacttcattccgtaaaattaaatattatttttattattttaaaatattcttattgtaatatattaaaaaatcaagggattgactaatctgaattacatattttaaatttaggatgacaaaaatatttttttaaaaagctaaagttagatctcaacgatgttggtatgtttttcaattaaacttatccttatgcattatcgcaaatctggtagtcattattgttcgaatacaattaatgatctgtcaagaaaatcatattactgattgttctcattttgaatatttgcattaaaaattttaaacatcggcatttaaactttcttttactgtttaaaaaaaaaagaaataatcgaatctagaagaatgaatatttcaaaagcttgtaaatattataatacgtttaaaaatatattttcttttatataattcaaatttagcttagtgatatatttttcaaataatgaaaattacctgtttttaaaaaaatactttaaacgtttatatcatttaaattctaattaaaatgttaaatatatactgaaaccattttctagataattacaaatctaaaattcaaaaattctcttttgaatatgctaaatcatagattaaattttatgtgtactaatcagaaacaattaacatagttttgttaaggaattgtataaaatttaaactaaatgagaatttgttattaaattagattgaagtttccgaattatctaataacatattaccaaaagaaataagtttacgtatatataattcaaattaaaatagcctgatatgttatggaaacgtttttaaatgatttccgcaattattctgtagatattaatttattgatttaattcggtttttaaaaaaagcaaaaatcaagatatttatttagttggagtagttgttaatttactaaattacccatgcaaaaaaatcatttagttagttttaaactacccttacaatgttgtagttcacataatgcttcccaattaataatatagatgttatccaagatccaaacagagttaaaccgggttatatccatccatttaaattaattgttaaatgatggctcaaatctcaaacattatcttcaaaaaagtgctgcaaaaatatatatatagagaaaatagaaagaaattttgaattatttgttttagtgtgattattctgaatatgattctaatgatgaaatttgttattctgttaagactggtatcagcatgcgactctgatttagctagctctattgagcaatctatggtggctagcattgccaatagatgtatttagcattatgttagtctgttagtggtattaaggttggttaatgttgtggaccgtagttccttatcaccttgataggggtcaacatcccaatcgagtatattatgtaaatattctgttagtatatggtttggatcaaccaataaatattgattcttcccacctaaaatattccgaaataattttcctgccaaaaattttagaaaaaatatttccctccaaagttttttttcgaaaatacatttttccgccaaaaaaaatattttggagggaaatagatttataaggtgttttaaaagatttttaaaaggtttacaaggatttacaaggattttaaaaccctttaaaaactcttgtaaatcatatatatgaaagttggccaactttctccatatgattgacacatcatcactttatcatttgccaagtgtttattaaataattaatgtaagctcttcaacttctaatttataggttaatgacatatttattatttaattttacatatttaattgtactattactaaatttattttaatattacatgatttttcaagaaaacccttttgatagttttctcatactcgaaatgttttttttgtaattcaaactcaaagtatgagtgtataatagtcgtggattacttaatgatttgagtaagttattctcttaaattaatatttatataataaatcactgagggtgaagaatacgcaaggagctccatcatcaaattcttaggtttctaaaatccaacactaccctcagttaaattggtttaagacaaacgttgttgatgaattatgtgtatgatgctaaaagtatttgcttattgctaaaaaaaatattttaatactgaaagtaattgcttattgcatgagtgaatgattagataaataaaaattatatttaaattaaacattacaaaaaaatccgaaaaaatcgcgacttagcgcgggtgatcacctagtctttataaaaccttttgtaagggttaacaagagattttaaaatggttcaaaaattaaaaaagggtttacaagggtatttaaaatattttaaaatggtttacaagggtttgaaaggatttacaagggttttaaaactgtttaaaaactcttgtaaatctttttaaaaccttttgtaaggcttcacaagaattttaaaatggttcaaaaagagttacaaatgttttaaaatatttacaaacttttttaagagtaaaaaaatgatttaaagactttgtaagagttttataaatattttaaaaggatctacaaaggttttaaaaatccttgttaattcttttaaaactctttaaaaactattgtaaatcttttaaaaccattgtaaaaggtgttaaaatgatgtacaaaggtttttgaaggggatctatattatttacacatatatttaaggactttataaagattttaaaaggttttaaaatgatttataagggtttttaacaactttacatagcttttaaaaaaatttacaaggtttttctacgagttttgaaagggttcttaaaaaagttacacgaattttaaatgcatttttggctggaaaaaaaactttttgtcgaggaaaaaaatagggttgactgaattttcaatcctatcctagatacaatctcaacattccatcccaaactttgtgcctctgaaaaaaccaccaaaaaactttaatctcaataaaactacatatgctttcggatttgttcttaaaactacgcctctaattgaactgatcagtaaaccaataatatctgatccggtttgacttacctagaatgttgaccaaaattaatcgattttacaatcatatactagttacaatctcaacattttgtctctaaaaaaacaacaaaaaaaacaagagagtcaaaatctggcgagaaattttattttctaattagatgttctcattagatgggggtaatttggtcattttgttcaagagaaggggtatttttaaaaatggataacagaaaagtgtattgttgcaaaatggtagtaaataatagtacttttgcaaatccccttagattttttacatttaaattattttgctttcgagatttggagttttaatgagtttttaaacgttatacattatgaaatgttaatatttttattatattatttttagtaatactctcaaaattttattgaattttggggtgttacaaatttatagtgaccattatatgtcgcatgatcaaggatatctaatatttttttgcttatatgggtttttttaatactccaatgttaggttaggtactagttctaatttgttccaagtttattttcttggggaattagttggaatgttgtgtatttattaataggtttttggttcacacgacctattgcagtgaatgcttgtcgaaaagctttggtaactaatcgtgtaggagattttggtttattattagaaattttaggtctttattggataatgggcagttttgaatctcaggatttgtttgaaatattcaataatttaattttaaataatagagtaaatctcttattctttactttgtctacgagtaaatctcttattctttactttgtctgcatttctcttatttgtaggtcctattcctaaatccgcacaatttcctcttcttgtatggttacctgatgccatggagggtcctaatcccatttcgtctcttatacatgctgctaataacagcgggtatttttgttgtagctcatcttctccctctttttattgttatccgttctataatgtatataatatctttgatatgtataataacagtactcttaggagccactttagctcttgttcaaaaagacataagcgggtttagcctattcacaatgtctcaactcggttatatgatgttagctctaggtatggggtcttatcgatctgctttatttcaattgattactcatgcttattcgaaagctttgttgtgtttaagatttggatccattattcattcaatggaagctatagttggatattctcccgataaaagtcagaatatgattcttatgggtggtttgacaaaacatgtcccgattacaaaaacggccattttaataggaacactctctctttgtggacttaatacaagaactttctattatccgcatgaatcagacaatactgttctatttcctatgcttattttggttttatttacctttttattggaaccataggaattcctttaaatcaaaaaggaatagactttgatatattatcaaaatatttcacgccgtcaataaaccttttgcataaaaattcacaaaattttgtagattggtatgaacttttgagaaatgcaactttttcggtcaatatatatagcctttttggaatatttatagcatactgtttatataagcctttttattcatctttattaaatttaaccttactaagttcatttccaaaatgaaatcctaaacaaattcattgggaaaaactattaaattttgtatataattggtcatataatcgtggttacatagattctttttttaaaaacatctttaattgaaagtataagaagattagcaaaacaaacgactttttttgataaaagaatcattgatggaattacaaatggagtaggtattaaaaaatattttgtaggagaagtaacaaaatatataggtggaagtcgcatttcttcttatatgttcttatagttgtcctatgtattgatttttttaatgatccttttttgtttttttgaaaaaatctaaattcgaattttctttatttccatattggttttcagaaacagttttatagttatagtatgttcgaacgtgtaattcatcatctttattaattttgtcttttccattcactaggatttctttcattttatcgattttgtccagatcttccccttctttcaaaaaaatagaaggaaaaggggtttcttcaatggatacctcttgctcctgtttagtcacacccctttctgaggttcctttaagtttcttagtaaaaatgggtgatggtattctgcctaactagtagacacagataataagtaagagaatactaaagattcgagccatagaatttctcaattctgacacaaagaacttatacttattagatctaataactacattagacctaatagaattattttgttgtatcgagactaataccaatccaaaccctttgcaggaataaaatgtgaccaattaaccaaccaacgaaactacttgttacaaataacatcttgttgttgtatcgaaacatataaatgttgactaatctagctaacattaaacttatttttgccgtcttagatttattatttattgcaaattatgaaaactgttacatagacgattgtactacgggcaattccttcctcccttattagatccacgacagacgacaccttcttctctttctccatgctcttgatggacaccttcaatgatcttatctgtgtagaatcctggtgaaccgctataattgtacatcgttggagatttcctgcacacttgtctccattaatctgcaaatttgctaataaaccgcagtatctaagactcgaacccagacttcttggtgtaaaagccttaatgaacccttagtcaaccaatgggcaagggggcttccacaactaacaatgaacttggtaaaatgaaatggttgaataattgaaatatgcgattattcaggaatacacattgaatgcgaagattacacattttatttctggtagtagatccataataaaaaaaatgtttgtgattgttccataataaatgaaacaaaagatacggtagagctagaacagttattgtataaggtctacacaatgctaaatgcataggcgcataatagattgatatgaacatcatgagctgtcccgtaataaaacatgttcttgctgatactttcttctcggttccttcttctccttcgtccataacccgagctcggagaaggaagagataagaaggccctatgtagaatgtggtcataaatccacaatagagtccgaccacaacgaccaaatttattatcttcatgcataaggatactagattacctactataaaagattgaaattccatcacaaacctctcttttttcttttctatttcaatttctagattattatatgatgattttgcaacttttcatatatataaatataaagagatagactagaaattacatctcttatgtcaatgacaccaaaatgatattaaatgaatggaattgggatatgtatggaatagaatgaaatagagccgctttgaggttccctattaaattaggcatcgaacggagcaacgagggttttgaaggaaactttgagttcatattggtcatgggttgagaacgggaattgaactctatgcgatctaatctcccattgttcctcagtagttcatattagtcatgagttgtgactatgatatattagttttaaactaaaaacttattaggttttatgaattataatctaaaactaattttttggtatttttatattaaaaatgggtgaattaattactcagatatcatagaaaagtatgtttattactagaatatcatagagttttaaaaaattactcatatgttttgagcatttgtataattacaattaacacctttgattagtttatctaaataatattttttttttaatttaaaaacaatcattatccacgtcattatcctaatccacgtcattacccgaaaatttcgttaaaccttttagttttcctttttccctctacacggttaatccgcgtgcaaaaaaaaaaaaaaaaaaaaaaagaactattctctggctctctcttctcttgttccgtcgacttgattccttaattggaaccctaattttgtcaatgttttctatttatctcatctctttcggccaaaatccttcgatagtgtcgaattttaagtcgagtaaagtcacatccctatcaagtcgcatttgaacttgttccggtaagtgtctaaactaactttaattagattttttcgacatctaagttcaacagcaagtgattcccgtgactgaaaccgttttacgaaaactgtgatattgagggtttttatcgacaattattacggttgattttcgccgtcactgatttacatacgatggctgatttgttagatctattcgatttgatggccgagttactgtttgtttcacgactgatttatgtttatcaatgcatctgtgtctgaatttgttatatggtgtgtttgagttatggtttaccaatgcgtatgtggcaaagtttgttttatgttacgattgagttatggtttaaccttacatctgtggctgagtttctgtgatattgtggctgagtttattttatgtttggctgagttatggcttaacctttcatctgtgattgagtttctgtgatgttgttgctgagttttttttttatgttttggttgagttatatttttaatgcatctgtggttgagtttgttttatgttgtgactgaattaatgtatgcttatggctgatttatggtttatcagatgtctgaagaccaagcaagggattaccctccaagactttatccagaaggggaatctaatctagagaataaagccattaatcacaacatcgagatgggagatgtccctctgattagagaatcaattagagaagatgcatggaatcaaatgaaaaagacacctcttaaagtaattgctaagctagttgatagtcattttgtttggtctgataatactgtacattcactactctgtagacagttaagaatactgaagaaggagatttggtgtctcgtggctggttaacctatcaggtttgacttgaattaatttggtcatatcacggggttaaacacagatccactgcctatagagtagtttgaacctgaagtggactacaaaacgttcttcagggaattgaatgtgcattgtggtgaaggtcctaagttagatacttaggcgaggcttagtagtgtggagagcatggcctcctgaaaagcgtagatggttggggttattgactcgtctagccaatggactttttggcttgcatcataactctaggatactatttgagagtgccaaaagaatttttgatgacgaagccatgaagacttatttatggagtcggttagcatttgaagcccttgttgattctataaagttgaagaggcctattggcaagtcgtacaccatcagtggtgttgctttcgtgttacaggctcgggcgtataagtcaatcaacaccattggagagcgatatgggaacgtaatcaaagaggatgagattctattacttagatggggtgtcaaccgtacccgtgcaacaatggaatcgaccattgctgaagatattacagcgcatggtggtgaggtaaggttttggctctgttatgatagttacttactgagttatgttttgtgatggctgagttatgttttgtgatggatgtgttattgtttattgatggttgagttatactttagtaatgacttggttgtggtttagtgatggtggaatcatagttgagcaatgtctgcgttatacttattgatgactgactgtaaacatactgatgggttttataatctcttatgttatatatgcgtgtgcgtaaaatggttatgacggatgatgtaagcgagctatttcatatgtggctagatgaagtagaagacccatcacttgatcacttgattgaagacatacatggggaatgttaaaggctatagggatgtgaagaggaatgagaagaagaagaaaaacgtaaaagataaagcagccgctaagtctgaatctcccgcaaagaagtagaaaatctatcacaatgagggtgtttaatctggtggaggatatgcacaaaagaagacgaggaagaagaagaagaagatgaagaaagtagctggtgaatctgatgaggacgaggaggatgttcggaaagttgtgtcggtcgtagatgtggtgtttaaattaatatctcacttaaactcaaggtttgacaccgttgatacaagcatcaaagaaatgtcctcccatattgagaaggtgattggagatcaagtagaagcgaggattgatgcaaagtttgaaagcaggtttggatctattgagaatgagttcaaacaaatgaaaaagcatctataggccatgggggtaggccaaactgaccaaactgactcataattattctctacattaaaagttaaaggtctggtccaaactgataagcagcgagaacagctgctacgacaaaatcaacaaacaccaaaaggtcctaggaaacctctaaataactactctgttactagtccttctctgataagctaattaccgttgagttatcaatacgctattaacttacgactgagttataatcatgttatttggctgagtcataagtaaagagcgtaatgataactcagcggttagcataccgaagcaagactagtaacatagttgttatttggaggtttccttggaccttttggtggttgttgattttgtcgtagcagctgttctcgctccttatcagtttggacagatctttaatttttaacgtagagaataattatgatcagtttggtcagtgtggcctacccccatggccttcagatgctttttcatttgtttgaactcattctcaatagatccaaacctgctttcaaactttgcatcaatcctcgcttctacttgatctccaatcaccttctcaatatgagaggacatttctttgatgcttgtatcaacgatgtcaaaccttgagtttaagggagatattaatttaaacaccacatctacgaccgacacatcttcccgaacatcctcctcgtcctcatcagattcaccagctactttcttcttcttcttcttcttttgtgcatctcctccaccagattgaacaccctcattgtgatagactttctgctttttttgcgggagattcaggtcttagccgtagctttatcctttacgtttttcttcttcttctcattcctcttcacatcccaatagcctttaacaaacttatccccatgtatgttttcaatcaagtgatcaagtgctgggtcttctacttcatctggccacgtatgaaatagctcgcttacagcatccttcataaccattttacgcacacgcatgtagaacataagagattataaaacccgttagtatgtttaaagtcagtcatcaataagtataacgcagacatcgctcaactatgattcaaccatcaataaaccacaaccaagtcattactaaactataactcagccatcaataaacaatagcacaaccatcacaaaacctaactcagcagtcacaaaacataactcagccatcacaaaacataactcagtaagtaactatcataacagagccaaaactttacctcactaccatgcgctgtgatatcttcagcaatggtcgattccattattgcacgggtacggttgacaccccatctaagcaacagaatctcatcctctttgattacgttcccatatcgctctccaatggtgttgattgaatcatacgcccaagcctgtaacacgaaagcaataccactgatggtgtacgacttgccaataggcctcttcaactttatagaatcaacaaaggcttcaaatgctgaccgaccgcctggataagtcttcatggcttcgtcatcaaaaacgcttttggcactctcaaatggtatcctagatttaaaatgcaagccataaaatccattggctagaagagtcaataaccctaaccatctacgcttttcaggaggccatgctcttcacactactaagtcacgcctaagttcatctaacttaggaccttcaccacaaggcacattgaattcccatacgaatgttttgtaatccacttcaagttcaaactattttgtaggcagtggatatgtgtttaacccttgatttgaccaaattcattcaagttaaacttgataggttgacaagccacgagacaccaaatctccttatttagtatttttaactatttattgagtagtgaatgtacaatcttagcagaccaaacaaaatggctatcaactagcttagcaattacttcaagaggtgtctctttcatttgatttcatgcatcttgtccaattgattctctaatcagagggaaatctcccatctcgatgttgtgattaatggctttattctctaaattagattccccttctgggtaaagtcttggagggtaatcccttccttggtcttcaaacatctgataaaacataaaccagccgtaagcatacattaactcagccaaaacataaaacaaactcatccacatatgcattgaaaatataactcagccaaaacataaaaaaaaaaaaaaaactcagcaacaacatcacagaaactcagtcacagatgaaaggttaaaccataactcacccaaaacataaaataaactcagccacaacatcactgaaactcagccacagatgtaaggttaaaccataacttagtcataacataaaacaaactcagccacatatgcattgattaaccatacctcaaccacactgtataacaaactcagacacagatgcattgataaatcataagtcagtcgtgaaacaaacagtaactcaaccatcaaatagaatagatctaacaaataaaccaccgtatgtaaatcagtgacggtgaaaatcagcagtaataaccgtcgataaaatccctcaatatcacagttttgaaaaaacggttttagtcacgggaatcacaagctgttgaacttagatgtcagaaaattccaaaaaaatttattttaaacacttaccggaataagttgagttcaaatgcgacttgatagggatgtgactttacttgacttgaaattcgataccaccgaaggattttcagccagaagagacgagataaatagagaacgataacgaaattaggattccgaacaaataatcaagtcgacgaaacgagagaaaagagcgacatagaacagtttatttttttggcggggatgaacagtgtagagggaaaaagggaaaccaaaaggtttaagagaatttttgggtaatgacgtggattcgagtaatgacgtggattaaggtaaatgatgtagataatgatttttttatttaattaattcttaagtaaaaatgaattaaataatattatttaataaaaactaatcaagggtgttaattgtaattacataaatgctcaaaacatatgagtaacttttaaaagatgtatgatattctagtaataaacatacttttctatgacatctaagtaattaattctaatttggggtgaaaaaataaaaaaaatacaatataacaacttacaacaataatctaaaacatatgtagtacataaagttttatctagatttgcaaagatcaaactttttaaaacttgacaaaaaatagtaggagcaatgtttgtatattgaagttctaaattaaatgaaaaagacaaaaagaagtaaccatacaataaaagatcttaggtatcaaaaaatgataaaaaaaagatcttaggtatcccatgaacatttggctatatttgtttatcattggttgagtactcacttttggtcatttttattgggaaactaatatacttttaaagattaatattatttttagcaacttgacacaatagaaatttttttatctgcccaacaaaaaaaaaataaaaaaaacaaagacaatagacgatttataaacaacatttctcaacttaaaaacatgaagacgaagtagaaaatgaaggaaaagaatttagaacatacctttttcttatctaaaagtaagaaggtgccttagatcttcttcatcaagtcatttctaaagaaaatccacctttcacatgttcacttctctatatgccccaaaattttgactcacctttttgttttaaaacctacaaaagttacataaaggaaaaaaacaaacttaagatattttagttatatatatatatatatatatatatatgtgagaggtagaatatgatgtttgatgaagattttaccttactatttatagaaaaatatgccatagattttaattgtttttttttgttttaatttggtcaaacatcatgaaagttacattttaaacaattaatatgcaataaattgtgattattattgcaaataatgtaaaaactatattactactttgcaatatttgtaattatcatgattattttttttttaataattttatttgtgttttatttttatttgttgtaaatgtaaaaaattatgtttccactcaggacagttaatacattattgtgtattaattaatatgttgagttattcttcttttgtaaaatattgggagttacattttaaagaatatatatatatgcaataaattgtgattatgattattattatagagaaataaaatatcatattgtcaacaaacaaatattataatctgttcatatattttttatatcttgaagtttttttaattaaaaccatgggataaaaagtactataaccagagcattacagctcaaaaagaaaaaactgagcaagatgctcatacacttataaaaaacagagcttcatatagcaagaaccacaccaaaaaactcaatttcgtttgtcttcttcaatatgtgagtgtaaccacatcggacttcctcgagccaaataggatctgctcctaccttctctcgttacgctcgtggatatatctcgtgctattttattggcttttagagatgaaactctaaacactagcttaccaaacttcggaagaagccgatgaattctatcaagataagataaataccttggccaatttatgggatcactaatggcttccatagcagcaccacagtcggaccatatctcaatgttatctaagtgtaagtcacataaactgtgtaagacccataaaacccctctcaactccgccgcaatacgatttgacgctggtagaaacatttctcgcggatgaaaaacagcatccccatgatgattcctctcaatccaagctccaccacatatgtgaacatcattgagccaagaaacatggatattacatttaagcgtatctagtggtggcttagtccatctaactgcacatcgaggattcaacgaaagacgatttacagactgggttggcatcatccttaacctgttccacaactcagattcttcaaaagcatgagctataagtgcatttaaatcaccttgtgttcccgccaataccgttgtgttgcgatgtttccaaattccccaaagtaaccatggaatggccattctcagagaaggagataaaccatcgtcacccattaagttcaagacaaagtctacgttctccgtaacagactgtgagaaaccatgagtaggcaaaggaatgttaaccctctcccaaacttctcgagccgtccaacaatgaaacaggacatgactaatcgattccctatcattttggcacagagagcagcgaagatcaatgttcataccatgagctcttaagcactctgatacaaccaatgcactagagacagcccgccataagaacatttgaatttttggaatggttttaatatcccaaatcttcactttaattgctcgaacttcttgttcttgtatggaaagttgtatcgagacttgcttctgctgagaaatcaaccaattgccactctttactgtataatatccattctggttataggcccatatgtaagtgtccggtaaaccaggatttggcggaaaagacataattctgacaatatccgcaggaaaaaacagctctgataagagattatgattccaagagccttgggggttaataaggtttgaaaccatgagttctaaatcaatgagagattgcttgttgtaaggtcgacgcggatatctatcgaatagccacttgtcaatccagacatttgtagattgtccattaccaatattcttgaggaggccttttcgagtaaatctctcccatgaatgatactgcgccacacatacgatggttgagaaccaacagccgcatccagaaattcatcacgtctataatatcttgctttgtaaactcgagcaaatagagagtgaggcttggtaagaagtctccaagcctgctttgctaataaagcttgattaaaatccccaacatctctaaagcctaagccaccttcttttcttgttttacacatcttttcccaagatacccaatgcatcttcttatgttcttcacatgaattccaccagacacttgtcattgcactagtaatttgttgacattgatactttgtcaatttaaaacatgacatggcatatactggtaatgccattgccacagatttaagaagcacttccttgcctcccatcgacaatgtcttcgcataccaaccagtcaatctagtctttagctttttagtgatgtatgccaacaaatcacatttagatccactgaaacactctggtagtcctaaatacataccatctcctccttctttagtgatccccaaatacagccccaaaagatgcttcataatcggctccaactttttaccaaaaataattgatgacttttgaagatttatctcttcgccagatgcatctccataagttttaagcatcttaaaatttcagcgccttctttaaagttggctctacatagaaatagactatcacccgcgaacaacaaatgttgaattgacgggcaactccttgtgagtctaagaccagatagacgtccttccgtttcagccttattcatggtatgaaccaaagcttcagcacataagatgaaaagaaatggtgatagcgggtcaccttgtctgatacctcgttccggttgtatgaacccatatgaatttccattaagtaagaccgaataagtaacacttctcacacaagtcattacccatgttatccatttgctatcaaacccaaggcgggaaaacaactcttccaaaaaactccactcaacctatcttacgccttagacatgtcagttttgagcgccataaaattttcattacactcccgattagttctcagcgcatgaaccttttcatgagctagaagaacattatctgatatcaatcgtcctgaaacaaacgcaccttgagcgtcagagacaatgtctggaagaaatacctttagtcttgaacacaatatcttggagataattttgtaagatactgagcagagactaatcggtcgcagatccgtcattctatctggatttggcttcttaggcaataagcatatttgagtaaagttccattcaacaggaaaggatcgtgaaacaaataacttcttaacttcctcacaaacctgctgtccaactacattccaataggattaaaaaaataatcccgtcatcccatctgctccaggtgcactgctactcctaatagagaacactgcttgtttaatttcttcgttagtgacctctttagtcaaagcaatattcatggtaggtgtaacccgaggtgccataccatcaagtaaatccgcagcattgcaaggttgtgatgaggtaaagagccgttgaaaataatttactacaatatcacctttagatccatctgcaaattgctccacgctattgtcatcgattaatgaaaaaactttattttgcgctcttcttccttgaacacttccatggaagtacttagtattcttgtcaccatcatgcagccaattttcctgagttttttgcttctaataaccttcttcctctctataagctacaaccaactctcctctccatttatgtaagagaaagtaattaggaaattgtttgctgccttctgtttctaaaaactctctcagcttcttgatctctgtcttagaatttgattgtgaggctcttttccatctggataatgatcttcggcacgctgcgagtctgtcaaataagcttgtgtgctcatccataccgtcactattccatccttgtctaacaatatccacggtttcaggtttagaggtccaccttttgtcaaacataaatcgaccaataaatgattggttttcattgacaaaccgagttatcaacggcctatggtctgaaccaattctctccaagtattcagactgcacacgcgggaaaatatgaaaccattcagcattcccaagagctttatccaatcggatttggatccacatgtcattgcgtttacccgcccacgagaatttattaccagaaaaaggtatgtcacggagacgacaatcttgtaccatgttgcgaaatggaataaaggaagattcttcacgaccaggcccaccaaacttttcagagttatcccatatctcattcaggtcgcctacaacaaaccatggatcattccttgctaaaccaatagttgttaaattgtcccatacatcttgtcttaaatgccaagctggatctccataaacaaatgaagcaaaaaaccataaggacccaagcttaacttttgtatcaatgattctcttgtccgagcggagcacttcaacttcatatgatgctttccaaaacaatgcccttcaggatccacgatatgaacattatcgtagcctaaccattgcttaactttcagtatgtaatcactggagttcttcgtctccatgaggaacagaatatccggaaaatgagtacgtctcatttcctttaaacttatgttagagaaaaattatttgatttttggcttgaaagttataaaactaataatttattctttaattcctgggaaattattttgctgagaaattctattgttatggtaactatatgaatatactgataaatgatacattattagaaaaataattaattataaaagggcattgcaaaaatgttaagagattttttttattataaaactatatttagacaaagtgaatataaaaatagtgtattaaatttgagaggaatgacacatgtgcaatgaatagagcgccatttgttagcttcttagagcatctccaagagatactctatcccctcaaatataaagttttaggttctccaagagatactccattacttcataatttagagtattgaatagtgacactctatatttggagtatcactattcaatactctaaatttgaagtttcaccttttttatttgcatttaagtccctaaaattcaatatttcatatacaaattactatgtttatcattttagtccttaaatttttatatattcaaagtatttcgacaatttttggcttgtaatctacagattataaataaaatgattcatctatgtcttcgtaatgcattgattgatcatatatgagagcattacggaaaaaaatttgttgagtaatttgtaatttataagttaatttatgtatttttaatttttatttatatgtattttatttataaatttattgttttgttaattaagattatgtgtaatattttaatgtatgttttagagttatttataaaagttatatggttttaaaattattatgaacaatataaggactataatgcaaaacacacattttagaaactttatatttgaagtataccgtgggagaagaaactactcatactttatatttgaagtttacatactctatatataaagtatctcttggagatgctcttagaatatcacttcgaggagatcttactttattatatagataaagatacatacttcttgttgcatcatcttttcttaactatttatagatgaccaataaaatttgtaaaactttttcattcggtaagttcggattatttgatattattatcaaaagatttaaatacatacttcttgttggatcataacgaatgccggttttctatttgtagaaataaacctaaatctattttctccctattttaaattgaaaaaaacaacaacataaattatggaaagcaaaagaaaaggcataaaaacagttcaaaacacacacatatgcattgtcaaaacacctcagtttaaggtctgccacaaactacaaaaccgcatgcaagccacttgtgtaaagtgtatatataccacttctttgtcttcacaccacatcacaaaactaaagaaataatcacagttatttttaccttttactcttcttgttctttaagacaattcaaaagagaataaggagagttttaattttctgtctaaagaagccgagcttcgtgaaaattgttgtttctcatcattgtgattcatcatggctgctgatatctcatgggatgaaataaagaaggagaatgttgatcttgtaagtaatttgttgttgctaaaacacacattttaccttataatagttttaacatgaattgttgataaaacgtacgaaaccatgaatgtatgtattacaggagaaaattccggtggacgaagtgttccaacagctgaaatgttcccgggaaggtttgtcttcagaggaaggaagaaacagactacaaatatttggggcaaacaaactagaagagaaggtagagaacaaatttctaaagttcttagggtttatgtggaaccctctttcatgggtgatggaagctgccgcaatcatggccattgtgttggcaaatggcggtgggaggccaccggattggcaagactttgttggaatcacatgtttgctcatcattaactcgacaatcagtttcatcgaggagaacaatgccggtaatgcagctgcagctctcatggccaatcttgcaccaaaaacaaaggtattaagggatgggagatggggagagcaagaagctgcgattctagttccaggtgacttaatcagcatcaagttaggtgacattgttcccgcggatgctcgtctcctagaaggtgatcctctgaagatcgaccaatctgctcttaccggtgaatctctcccagctactaaacaccagggagacgaggttttttctggctccacttgtaaacaaggtgagatcgaggctgttgtcattgcaaccggagtgcataccttctttggcaaggcagctcatcttgttgatagtactaacaatgttggccatttccaaaaggtatatatgactgacctctgaattatatttccttgcgatgcaagcaatcttatgatataactctaatatggtcttgataaatgttgcaggtcttaaccgccattggtaacttctgtatctgttcaatcggaataggaatgttgattgagataattataatgtatccgatccaacatcgaaagtatagagatggaatcgacaatcttcttgtccttctcattggaggaatcccaatcgctatgcccactgtgttgtctgtcacaatggctattggatcacataggttgtctcaacaaggtgccatcacaaaacgaatgaccgccatcgaagaaatggctggtatggatgttctttgcagcgataaaactggaactctaactctcaacaaacttacagttgacaagaacttgattgaggtttcaagacaaatctcttcatcatcataatttgtttttaaattggttacgttagaagcttcatgtcttgtggatttctttgttctttaggtattctccaaagacgtagacaaggactatgtgatactactttcagctagggcttcaagagtagagaaccaagatgcgattgatacttccattgttaacatgttgggtgacccaaaagaggcaagagctggaataactgaagtgcatttcttgccattcaatccagtagaaaagcgaaccgcgatcacttacatcgataccaatggagagtggcatagatgtagcaaaggtgctcctgagcagataattgaactctgtgatctcaaaggagaaacaaagagaagagcacatgagataattgacaagtttgctgagcgtggtctacgttcactcggggttgcacgtcagagagttcctgagaaggacaaagaaagcgccggaacaccgtgggagtttgttggtcttttgccactctttgaccctccaagacatgacagtgcagagaccattagaagagctcttgatcttggtgtgaatgttaaaatgatcactggagatcaattggctattggtaaagagacaggtcgtaggcttggaatgggaacaaacatgtatccttcctcttctttacttgaaaacaaagatgacaccaccggaggagttcctgtcgatgagctcattgagaaggccgatggattcgctggagtctttcctggtagagtaaccatcctctatttcacttttcgtcccttttttgtctctaacctaattctatgatcttgcgtagagcacaagtatgagattgtaaggaaactccaagaaaggaaacatattgttggtatgaccggagatggtgtcaacgatgccccagcgctgaaaaaggcagatattggtatagcagtcgatgatgcaactgatgcagcaagaagtgcctcagatatagtcttgacagagccaggtcttagtgtcattgtcagcgctgtgctcaccagtcgagctatctttcaaagaatgaagaactacacaatctacgcagtctccatcacaatccgtatagtcctcggcttcatgcttgtggctcttatttgggaatttgacttttctcccttcatggtcctcattattgcaatcctaaacgacggaaccatcatgaccatttccaaagatagagtcaagccttccccaattcctgattcatggaagcttaaagagattttcgctactggagttgttcttggaacctacatggctctcgtcactgttgtcttcttctggctagcccatgacacaaccttcttctcggtaatctatacaatatatactagtatatataagtatttaattttattattatgatctatatatcatctttgtgttgtgttggtgtgtgtaggataaatttggagtaaggtcgttacaaggcaaagacgaggaattaatagcagtattgtatttgcaagtcagtataattagtcaggctctcatctttgtcactcgatcaaggagctggtcctttgtcgaacgcccgggacttcttcttcttattgctttctttgttgcccaattggtacgtcatttgtatacacacagagaaatttcagatatatatatgtctctactaaagtttttttctttcccatgcacaataacgtacagattgcaaccttaatagctacttatgcgcattgggaatttgcgagaatcaaaggttgtggatggggatggtgtggagtcatctggatctacagtatcgtcacatacattcctcttgatatcctcaagtttatcactcgctatacccttagtggcaaagcttggaacaacatgattgaaaatagggtatgtgtgaattaaaatcttgattctaaaaccccacaaaatatatatattgacattatttgttttcccttcttgtgatctaagactgcattcacgaccaagaaagactacggtaggggagaaagggaggctcaatgggctctagctcaacgtacgctccatggacttaaaccgccggagtcaatgttcgaagacacggcaacctacaccgagctctctgagatcgctgaacaggctaagaaacgtgcagaagttgctaggtatgtaaaattgatcactctgaaagatttataggtaaacatttttctacaagattgataagagttgtgttgtgttgtgttgtggtgcatgcaggctaagagaagtgcacactctcaaaggccacgttgagtcggtagtgaagctcaagggtcttgacattgataatcttaaccaacactacaccgtctaagccaaactactatgacatttcaattattcgaatgggacacatgacaacgttctaagcaataaaagttggagaaaatggaatcataaagataaaaagaagaaaaagaaagttccggtttggattctccttcggttttgatttcgtttttcttggtaaaaacatgatataatcagcggaatgctgcaaaaaaaaagcaaaaaagaataagaagaagatggtaggatgaatgaatgagatggaataaaggacaagaagagacatgtcgtcatgtgatacactcgtattcattacttactattagtaatcccatattttttggttataagctttttctctatgttctttcttttttatgagaaattgaatttgataaatgataggaataaaaaaaaattcaagaaaaatatatgattttattcggcgaatttctatatgcatggtgtactccacttttaatgcataatccttatacaaactatatgcagtttaattggtattagattatgatccatgttgtaaacgtaacatgtgttactggttttttattagattcaaaattgttaatttatatttcaaaataaataatgttatagttagtagaaaaatattaatttatatcatatgtattacttagattattttttgtggtctagtactcagttttattatattatatattattttgtatttagatatactgatttaggagactgataattttaagattatatttaaaacataattaattatattatataaagcttgattatcgaaggtagtacctcatatatagattagattttgaaatgtgtagaaactaaattatataaacgtgctgatttaatttaatatttctttgatttatttcaattttctttccaattagaaatatgaaataaattaaattatattttttagtattatttatttgagttttcattttcagttagaagtgtatgcgattaatatatgtttttgtttttctttttgtaaattgtttcaacttaattttgtattttttgttggtaacggtaagatcttattatataaaaggtatcgaatgtttgaagcggttaaagcaaacaaatcagtttgcggtttggccgttttttgtttgacattcataaattataatctgtagtagtacggactgaaaaaagtataacaaatctgcggcggactaactacggaccgcttttacgttgagacaaatttattctgcgatagtttgttgtccgttttaaaaatagagtcgttttctcaacttttaccataacattcattcaaaaccaaattttgtaactcttttgattgtgacacatgtcaagtctaccgactagattttgacatgtataaaagaagaaattacagatatatgataatttaatttaatatttatattatttctttcacttttctttccaattgaaaatataaaataataaaaatatttacaacggttacaaatttaccatctactataccaaaaaaaatatgtttttataccatttatgaattataagataggtaaatgaccataaatggtataagcagtctgatcttctagcctgatctctttttataccatgtatctgcttcaaacagatccgcacttcatggacaaccacataccctatcacacccactcttcagcaacaagattcagctccatttccatctgcttcataagttgagatgtcttaactcttttttgaacttaaactttatgtcactatgtttctatttctgtttaatttggtatgaacaaatacttaatgctgttgtcttcactttcgtttgggtgcaaaaatattttctgtataattttgttttgtttttgatttgtgtttcaatttagttaaccatagtctaatcggaaaataactattaatataaatatgccaaattttgaatgtaatcatcacatagtcatataaaatggttgtcaaattgtagcttattagtcaccaaatttatcgtcagtatattgactactacaacttaggcttcaataatagtcataaaagagtcgttaaaaagccaacaacaaatttacgactacgatcagagaacaatatgttcaactgagctaatcataaattagtcgtaacatagtcattaaatattacaacaaacctacgactaatctacgactaaaatttcctcatgcgacatggtcgttaattagtcgccatttagcgactaaaataacgactataagttttagctacgatttatgactacctattttaatcgtcaaatagtagtaatgaccagtttaacgacttctttactactataattgtagtcattatacaacggttttcttgtagcgcgactacaaaaaaacctgcattttaggactatattttgtgaccattgttttagtcacaaatatttgtgactattttgtgatttttttgcgactgattaacgactacacaaaatatagttggaaaaccgtctcaaaatcatgacaaaaaatattgttggtaaaccgtctcatatatgtgactgttataagactataagttggctatatggttttggtcgtaaaatagttgcaaactaagacgaattagaaacaccgtttttagtcggaagctttagccacaaagtagtctcaaatttgcaacaaatttgtaacttcaagtatttaatttatatcaggtttttactcattaaattgagagatcttatttaatattgtaacatgagtgattgtagaatcatatgtagtattttttttacttgtaaacttcaaaattcatatactctgtctcataaaatagtgtcaccgaacagttattttgtgactattttgctaatacggtcacttatttgcaactactttcttacaacgttgcaaccctcgcaattttattaagatatttacaaatagataattgttaatacgttaagttttatatgaataatattgtataatatgtagatgcccattatgcggtccattagtatattctagatctagaaggttacagatgactcaatatctaaacctaaaacctaatgttgtatcatatatatatgatttatcttatgaataaatcaataacagagataaacagttccctaaacccattttttcacaacacgttatcagcataagttctagctatttgagtaaaaccctaacaaggcacgaaaccatagccgcctgaactagtaaatatatcttcgaaatctatagtcgacggcgactttgttcgttgttcacgttctccaatcacgccaaagacaagattagaaaggtaactttatgctttactgtttgctactatgttcgatgcttatttaagtattgtttcatgaaatctgtttgttattactaaatcttatcaacgaagctagctagtatttggattcttaaagctgaataatatattatttgttttggtttggtaagctattagatgcttcttgttaaagagatccgtgtagttattatatgtttctctgatcctataagattctaatctaatataagttaattcacccttcgtgtacctaatcgtgaatccatcgtaattcgtaagttgttaccaaaccatgttttgtcattaattaacacatgtctctattactgatttgttgatttaccagataacactcatgcttgtcacttgttagtactcgttggattaaattgatttggaaaattcatgcagaatttacttccaactgatttgatatggtatttaatatcctagtgctttataattaatcaatacaattataatcatgtcgatttggtatttgatgcttattattattttatgatgattaactaaacactttctttttctcctttgaaacgaaagtttttactaatataaaggattgaacaaagagaaatctaaatcacgaatctttaaacaatgatgcatccatttcccggcaaagtcttttatcttagatcaatccaacttatcaagataagtactacgtaccctcaatattatgatcggctacacaacatcttcatgcaaaaattacgatcgtaatacttaattattgaaatcgttattgctttgtcatatgttaaatttgtaatgtttcatactgtggagatgatagcttgtagcacaagaaactaaccaaggttgatgtaagtcgaaccatggttgagttacttttgggaccactttcttgaggcaacggctatgaaggagacagcctggaaatagtcatgttttgcgcttaaggacattttgtcttgtgtgtcgaaaagagaaacaggatcagagtggctgcagcaatcgttttcaagttgttagagttggcgtttagcaaacgcaggcggctacttgtttgttgctgaagtgaagccctaattgttacttggagtataaaataggtgcttgtgtgataagagagagagtgtgagagaaataaaagaagtgaggtgttcttgagagaaaagcattacattgtgtaaacttgtattgagttgttctctgcggattacaagggtagtgcagagtgacctaagtactagtgaagggtattaggttgtcacttgtatactcttgttgtaaagaaacaccatctgatttctagtggattcccgaggcaagtctcggcccagacgtagctacccttacgggagtgaactgggttaacaaatcctgtgttcttcgtttttgttttctcttctgttgctagtcttgttcttctgaaacacacacacactcagttctctgttccatcattctgttctctgttttagtgcctctgttctgtctttgttgagtgtctctctagaggaagtcgacaccttttagagtaagagatcttaacagattggtatcagagctgtaggttattgcttgtggttctgtaaagtctcacaatcattgaaccatgtctacggctaggatagaggttgagaagtttgatggtcgtggtgattacacgatgtggaaagagaagctgttggctcatatggatatattgggtctaaatactgctctcaaggagtcggagagcaccggtgagaagaaatcagttctggatgaatctgatgaagactatgaggaaaagcttgaaaagttcgaagctttagaagagaagaagaagaaggctaggagcgccattgttcttagcgtcacagatagggttctaaggaagataaagaaagaatcgacagctgctgctatgttgttagccttggacaagctatacatgtcgaaagctcttccaaacaggatctatccgaagcagaagctatacagcttcaagatgtctgaaaatctgtcggttgaaggtaacattgatgagtttcttcaaattattacagatttagagaacatgaatgttattatctcggatgaggatcaagctatcttactgctaactgcacttccaaaggcatttgatcagctgaaagatactttgaaatatagctctggtaagtctatattgactctagatgaggttgctgcagctatttactcaaaagaattggagttaggctcagtgaagaaaagtatcaaggttcaggctgagggtctttatgttaaagacaagaatgagaataaagggaagggtgaacaaaagggaaagggtaaaggaaagaagggcaagtccaagaagaaaccagggtgttggacttgtggtgaagaaggccacttcagatcttcttgtcctaaccagaacaaacctcagttcaagcagagtcaagtagtgaagggagagtcctcaggaggtaaaggaaatctggctgaagcagctggatattacgtgtctgaagctttgtcatcaactgaggtccatttagaagatgaatggatattagacacgggttgcagctatcacatgacctataaaagggaatggtttcatgagttcaatgaggatgcaggcgggtcagttagaatgggaaacaagacagtgtctcgggtcagaggtgttggaaccatcagagtcaagaacagtgatggtttaactatcgttctcactaatgtgagatacattcctgacatggacaggaatctgctgtcattgggaacttttgagaaagctggttacaagtttgaatcagaagatgggatattgagaattaaagctggaaatcaagtgttattgactggaagaaggtatgacacgctttatttgcttaattggaaacctgtggcaagtgaatcacttgcagtagttaagagagcagatgatacagtcttgtggcatcagaggctatgtcacatgagtcaaaagaacatggaaattctagttagaaaggggtttctagataagaaaaaggtatcaagcttagatgtatgtgaagactgcatctatggtaaagccaagaggaagagtttcagtctggcacaccatgatactaaagagaagcttgagtacatccactctgacttgtggggagctccatttgttccgctctcactagggaagtgtcaatacttcatgtccattattgacgactttaccagaaaagtatgggtttattttatgaaaactaaggatgaagcattcgaaaagtttgttgaatgggtcaatctggtggagaatcagactgataggagagtgaagactctcagaacagacaatggtctcgaattctgtaacaagttgtttgatggcttctgtgaatcaatagggattcataggcatagaacttgtgcgtatacaccccaacagaacggtgttgcagagcgcatgaacaggacgatcatggagaaagtaaggagtatgctgagtgattcaggtctacctaagaggttttgggcggaggcaactcacacaacagtgttacttatcaacaagactccctcttcagctctaaattttgagattcctgacaagaagtggtctggaaatcctccagtttacagctatctgagaagatatggctgtgttgcgtttgttcacacagatgatgggaaactggaacctagagctaagaaaggagtgcttattggttatcctgttggagtaaaagggtacaaggtgtggatacttgatgagagaaagtgtgtggttagtagaaacatcatctttcaagagaatgctgtgtataaagatctgatgcagagacaagaaaacgtttctacagaagaagatgatcaaacaggatcttatctggagtttgatcttgaagcagaaagagatgttatctcaggtggagaccaagagatggttaacactatacctgcaccagaaagtccggttgtctctacccctacaactcaagacactaatgatgatgaagattctgatgtaaatcagtctcctttgagttatcatttagtaagggatagagacaaaagagagataagagccccaagacgtttcgatgatgaagattactatgctgaagcattgtacacaactgaagacggtgaagcagttgaacctgagaattaccgaaaggcaaagttagatgcaaactttgacaagtggaaactagctatggacgaagagatcgattctcaagagaagaacaacacatggacgattgttactagacctgagaatcagaggatcattggttgcagatggatttttaagtacaaacttgggattcttggagtagaagaaccaaggttcaaagcaagacttgttgcgaagggttatgcacaaaaggagggcattgactaccatgagatctttgctcctgtggtaaagcatgtatctataagggtgttgctttcgatagtagctcaagaagacttagagctggagcagttagacgtgaaaactgccttccttcatggggagcttaaagagaagatctacatgtcacctccagagggatatgagtcaatgttcaaagccaatgaggtatgtcttcttaataaagctctatatggactgaagcaggcacctaaacagtggaatgagaagtttgacaacttcatgaaggaaatctgttttgtgaaaagtgcttatgacagttgcgcttatacaaaggtgttgcctgatggttcagtgatgtatcttctcatttacgtggatgatatactggtagcatctaagaacaaagaagctattacagccttgaaggctaatttgggtatgcgttttgagatgaaggatctaggagctgctaagaagattttgggtatggaaatcatcagagacaggacattgggtgttttatggctgtctcaagagggttacttgaataagattcttgaaacctacaatatggctgaagcaaagcctgcaatgactccactgggagctcatttcaagttccaagctgcaacagaacagaagctgatcagagatgaagactttatgaagtctgtcccctactcaagtgcagtggggagcattatgtatgccatgcttggcacacgtcctgatctagcttatccagtgggtatcattagccgttttatgagtcaacctatcaaggagcattggcttggagtaaaatgggtgctaagatacattaaaggtactcttaaaacaagactgtgttacaagaaaagctcaagtttcagtattgtgggctactgtgatgcagactatgctgcagaccttgacaagagaagatcaatcactggtttagtgtttacacttggtggaaacacaataagctggaagtcaggcttgcaacgagttgttgctcagtcaacaactgaatcagagtacatgtcactcacggaggctgttaaagaagcaatttggttgaagggcttacttaaagacttcggttatgaacagaagagtgttgagatcttctgtgactcacagagtgctattgcactctcgaagaacaatgtgcatcacgagagaacgaagcacattgatgttaagtaccatttcatcagagaaatcatttcagatggtactgtggaggtgttgaagatatctactgagaagaatccggcagatatattcaccaaggtattggctgtgagcaagtttcaggctgctttgaacttgctccgagtcaagtctgagtaatggactcaggatccgagactggaatccagaaactagaatcaggtactctctctctcttttctaaactctagatgttgtgaatgtttactgcttatgctatcaggtggagatttgtggagatgatagcttgtagcacaagaacattcaaatgtttgactcaacctgaagagtgaaactaaccaaggttgattaagtcgaaccatggttgagttacttttgggaccagtttcttgaggcaacggctatgaaggagacagcctggaaatagccatgttttgcgcttaaggacattttgtcttgtgtgtccaaaagagaaacaggatcagagtggctgcaacaatcgttttcaaagttgttagagttggcgtttagcaaacgcaggcggctacttgtttgttgctgaagtgaagccctaattgttacttggagtataaaataggtgcttgtgtgataagagagagagtgtgagagaaataaaagaagtgaggtgttcttgagagaaaagcattacattgtgtaaacttgtattgagttgttctctatggattacaagggtagtgtagagtgacctaagtactagtgaagggtattaggttgtcacttgtaaactcttgttgtaaagaaacaccatctgatttctagtggattcccgaggcaagtctcggcccagacgtagctacccttacgggagtgaactggattaacaaatcctgtgttcttcgtttttgttttctcttctgttgctagtcttgttcttctgaaacacacacacactcagttctctgttccatcattctgttctctgttttagtgcctctgttctgtctttgttgagtgtctctctagaggaagtcgacaccttttagagtaagagatcttaacacataccaaagaatctatcttggaatattaacattgcgttataaatccatacttagaagatccaatcacgtcttatatattgattcataattattactatatgtatgatacatgtttcacttctcttttatatgtgagacataaaacaacggatcaattcatcttttataattgtgcatctcattttataggatttataatgattgatccatgtttatgcaattgtggatctagtaagaaaaatatattatctgattgcttttcttacttaattgtttggtctagtaaatcgttagtttggtacaccaagattcatattttattacgaagatccattaaaacgttgattaatatcttttaatgttttatgcttcaaattaccgattttgaaagttaaatttataaaattaatatttttctctggtttgttttgtcacagtttgctactgcaacatgattatatataggacaggcgaaccattattagtcgaagaggtctcggtgtctaatttcggataatgtcgccatcgagataagtattatcttttctagtttcattgattagcatactaataagtattgtatactttcgtgaatagattatgtcttatgaaaatctatatatatatatatatatatatatatatatatatatttatctgattgatagaaatttcacgatcacaaatttggcacataatgtcttctatttgagaatcgaataattaattaaaaatatagatcaatggcatgataatgacaaagaaaagaaaagcgtaatacaaagtagtatgaaacttatagaatgctccataagagtacatagttgtcattatttgtcagaatattattgaaatatttatgtatattatatactcgtaagtcacaaatatataatatatgactcaagtaggatatgttattgagtctaaatgggattcaattcgaaatcgataaacttactgttatcatctcgagggagagagttaaggaatcccatataccataataagagaagcatccagaagattatgtccacaaaaaaattaagattgatgaatctttctatgagattttgggataaatcatgtttagacaacaactaaaagaaatgttaaatcccattaactcataagtattatctaatgctttaatatatttagaggaattacatgcgttctatatatgattctactatataaagattactttaataaaatataattgtgtatagtaagccaaatctttattgaaaacctcactgtttggcatgatcggttaagccattccggttagtagtgatgcgaaggaataattataaatttatggaaacattgattagagatctagaagatttttcctaatgatttcttatgtgttgctgcttcataaagcaagctgattatatggctttcactgactgcatgaatttggatcgtgttaatttactggtacatatatgaggagatattgttgactgatcatcaactatataattttgttataaacttgcaacatgtagtttgtaagtgtatttggttaattgataatggtggtgaaatcatgccataagtaaatgactattctatgtcaaattattcgcatcaggccaacaataaagaatgagttctctcctttacaattggtttaggtcaggaaccagatattttctatctaattgtgttatacatattgagttgctccaccagagtgatataaaatgaaatttgaaagaatgtgaatctctctcgatgattgattatcttgagctatcaataacgaaatgatttaaggctcaaaatgaagactgttatttcagtgactcagtctttccaacattagggggtaaaaataaacagctggtaaagaaatatattggaaaattttatcttgatcctcatactaaagaatgtgcaacaagtaaaaagataattcatgcaagaagcatttattgatcttgagtgacaaagtcacatatacaagatgtgctccaattaaaagtaatttcctagaaggatataatcaaatgctagtaattctaaagatcacgtgaagcgtgagagacttggttccaaaatataagcagcctcaaaaaagaaaagaaaagaacaaggagcataaattaatatggcaccgaggaaacaatgaattatgaaatatctctagaagagagttatacatgtataagaaatacattcaggtacttgagaatgataatgaaaccaaatctcaacaagttgagtcatgtctagaatagaatggaaccaaaagcaaactaacgtcataattcattttgcatgtagtgaagcagttgataatgttataaaggaaaatcgaggatcataaaccacagttgatagaaagatttattgaaaagtatatatagacagtaattattggtcaatcaaggaaataagttatagaaatatcttgaagaaaaagtatttggactattggtccgtacacttgaaggtgtaaaaactaaatgagatgtaagttgatcattatgagatgtaagtggatttgtatgagatacaagttatgtttagtaacaatgattcttacaaagacttgaaattgattacaaagagatatactctcttgtggtggatgcaaccatttagatcatctatgtgtttgagaataagagaagacttgtattagtcatacaatgatttaaatttataaaagcactctagaagatttaaagcttaaactgttagaagctgtattaaaggattatattgccagaaacaacaaatactagttctcaagaacaagagactatatgtatgaaaataaattgatgttgttatgaattcaaacatcgggcgaatatatgataatcaccttacttgatacttgttaaagaaagctacaacaatacgtgcaaaatatgttgatgacttcaatattatcgagtctcatgtagagatttcatatatagtaaaatatcagacgaaagaatttcagatgagatcattctttaggaaaatgtagaaatcagattgttggataatccgagtcttcatgaaatttctcggaattacaaattggaaatccagcataagagatcttatttcaaatatccttatagaattttccatggaaaattctcacttatatttggtccagaaaaaccataataaggaggaaagctaaaatagtaagttttatatggagagcatgaattactcctatgtataaaattaatgtttgaagatcatatgtaaaaaaaatttagacataaagtctaagtagacaaagaaataatttactatctaaaagagatgttatggactagaagttaagtgacttgataggttatatgacaatcatacgagtatgtttactaagtttaagaatataaagatttcttaaaatatgatatatatgataagaatgcatatcttgaagataatgattttagggagagaaatatggttatgtgcatagttgtactcttttccccttatcatgattttatcccattgagttttttcatgaaaagtttttaacgagacaacaaataatatacgaatgatagacacataaagagaaatattgtgattctgatgatgaaagaccattattattcaaagtctttgccatacattgatgagattctggtaagtaaagataatgatcaagatgagtcatgatatacctcaattttcactgcttttagctctgatctaggtatagattttagagaatttttgttatttctagtcttctacagttttcttcaggtctttacatatttgggatgcatttggagattatggagcattcaatagcaaaacagacaacttatactacagaagcaatccgcacaccaaaatccgcgtaggtgttgatcgacaccaaccttagtgtcgagcgacaccaatatatgacggtaatttaattttgcaacttattgaagttttgaagatttttaaatttgccccagaagaagtccctcacgtttttaggaacttatatatagatttttaaggtctttgtttagacctaaccctgaataacttttaattacttttctttacccttaattttactttgttcttgagagccaaaaacctgtggagctccttctacagaaaatctttctaaactctattctcttattgtttcttactttgatttctactttaatcatgttttgttctttgataatcatgtctgagtagttcttttgttggatttagggattctcatttgggatttagatgaattagtagatcgaaaaccatgttaggataatatatttagaattcttcatctttgattgttcttaatgctagttctagatgaattaactagaacttgattttaggttaagaagtagtattcaaaatggcatctattaccagagctatcttacatgagcatagtatttagatgcggactagcatcgatttaggtacttatgtgaacttatcaaacctgattataatagagttgggatcaatactattaaacatagtgaataatgaggcaaaccaccggttacactgtagtagtgatttaaaatctagaattgttcgagaataatcctaatttacttctagatttactactaagatatttcttgagaatttccctaaacatgatattttaatcaattgaatctacaatctcttttgttgctttcttgtcttttattttcttaatattttgtgtttagcttaattcgaaactgttagtctattgtgtgatctgagagctttgtggaattcgatctccaagtgctataacaacctctttatttgtgagagtagtcattagggtaattagactcatatcacattttagaatttaatctaaacttttttttttcttttgttactcatgcgtttttatttcttcttcttcttgtgtttcaggagtttaaggaattcaaacacaactacaagatgctgatagtaatacctaatgctgctggagtgtaacgcgatagagctagtcaggcatacaacgaaaagggtcagaaaatagataaacagggaaacgtgagatcagaaaccgccgagggtgtcgatcgacaccaacgggaaatcagtgcagatggtcgtcggatgactcttgctgactacaacatactagatctcttctattccaatcagtctgcaatccgaccacctacatatgaaagacgcgatttcgagataaaacatgtattctttacgcttgtgagtatgcaccctttccaaggtctagcacaagaacacccgatggatcatattgagcgacttgaagactcggtttcgagtattaaggtagattgtgtttcttaccaaagttgtagtcagcaagagtcatcaaagttggttttcttcttggtaatttacaggttcagtatgctgcacaggttgacagtttggccacttcagtgaagatggatcaaaagggatacatgagctacattcagatatcttcatctaagacaccgtttcagcaatctacaagcttcatttcaactttcttcaaccctagcccaccctccacacgagaccactaagacgactgaattgatgctcaaacagattctcaaaggtcaagagaagcaaactacagattttgatcacaaaatggttgcattatcggaagatttgaatgggaagattcaaatattgaacaattaaatagagtgattgagtatggatatagaagatgttagtgctattcagttacaaagtggaaaacagctaaatctagtgcttcaaagcaagctttctacatccaaaatcatcattttggaagacaatgaaaatgtagtttttgtagaccagatacgagtgtcgaccgacactattgagtgtccatcaacaccagccaacgcagacactatagaaatcgacagcgtcgaccgacaccaacagtgtgtccatcaacaccaacccagtctagacttgcgaattctccaaaacccgatttcagtaggcagccaaacccaaggtttcttctccaaacagcgaattctccaaagtccaaaaaagagccagataatgctagatgcaaagctatgatggataagctgattgtagagatgccacttatagatgttgtgaagtcttcacctacggttagacagtatgtgaagaggatggttactaaggatttgaatactgagccaggtgtgatgacgatttctacgcagattagcgacattattcagaataagattccacacaaacttccagatctaggtagctttgttctcaattgtagtattcttaacgagagttttgcgcgatgcttgtgtaatcttggttcgattgtcaatttgatgccgcgatcagttgcgctatgccttggtttgacagattgtgagccaacgcaaatcactgttgttcttgctgatcgatctgtccgtatacccgatggtatcctatgcgatgtccctgtacaagtcggtaatagcatgattcctacagattttgtggttttatcttatgagaaagaacctaaagatcctctaatcttggtaagacctttcttagccacaagtggtgccattttgacgtaaggaagggcataataggcttgaatgttggtgatcttaaaatgtagtttggcatgaataaggtgcttaagaagcctaccatcgatgtgcagactttctatgttgacactatctcgtctctagatgaagcatttctcatggagatgacacctgctgatcctttagagcatgctcttataccttcaatagacaaagttcccgacgggtatggtaaactgctaaatagaactgagcatgtaatacaattggttgctcaagaggagttaattggcacatctactaaagcagcaacagttggcgattggagcaaaaaataggcttctaaagttgatctaaagccacttcttgtcattgttaatgcttcttcaaacatcgcagagcttactttattgctaagcaagctgcgtaagtatcgcaaagctcttggctattctcttgatgatattacaagtatatttcccgacttgtgtatgcatagaatccacctcaagaatgagtgtaagctctcagtagagcatcagaggagattaaacctgaatctgaaggatgttgttaaaaaggagatcatgaaattgttggaagctcggatcatctatcctatttcatatagtgatttggttagtctagtgcatgtggttcctaagaaaggagttgttacaatggttatgaatgacaagaacgagttgattcctacaaggaccgttagcggccacaagatatgtattgactacaggaagctgaacgctgcaacaaggaaggataattttcctctaccattcattgatcaaatgatggaaaggttagctaatcacaagtactattgctttcttgatggatactcaggattctttaagaaactgattcatcaagatgactaggaaaagaccactttcacgtgtccgtatggtacttttgcctatcgcagaatgcagtttggtctttgcaatgctcgtgcgacatttcagagatgtatgatgttgttgaataatgcctattttgcttttaaaccaaattgaagaagtcaaagagagaacaagtagttacatgtgaaagaagttggtttgaatctagttgcttttggaaacctaagctataatctagagtaagcatgcttgtagtgggagcggcctacaatagtgtattcgtgtaggtgttagaagctagtgtcttgtgttttactttatgttttgcgataagaatgtatgtgtgtttgaaagaattatggaaaattctaagaaaaaacagagtttatgcatttctctctcaacttctaattcgttttaattcacaaaacatgagtgaaagtgagaatcacaacagatgttgatcttcatagacatgattgaggatttcatggaagtctttatggatgactttcctgcttattggtcttcaattgaagcatgcttggagaacctgtgcaaggttctagctagatgtgaagagaagaatttgggtcttgattgggagaagggtcatttcatggtttaggaaggtatcgttcttggtcacaaaatttcaggtgctggtattgaggttgataaagccaagatagaggttatgacaagattacatgcactagttagcgtgaaatcaataaagagttttcttggacatgcttgattttttatagaagattcgttaaggatttcggtaagattgcaaggccactaataactttgctttgtaaggatgtgaagtttgacttcaattctgactgccatgctgctttgaatcaaattaagaaagctttagtgagtgctccaatagttcaaactccggactagaatttacattttaagataatgtgtgatggaagtgattttacagttggagctgttttgggacagagcgagaacaatatactacaagaaaacaggcgaattgcgagggaaatttacgatggaaaatagccaacgtaacgtgtaagaaatcataactcaaatcacaatatttacttacaaacaaaaaaatcttttttaaaaaaaaaacttcttacaaaaattataaaattcctcgacttagtcctagtcctgggcaggggtattacaatacctatccaatgaagcgagtactcctttgtctaatctccaaaaaaataagtcttgggagagaaagaatacaaaagaattattgaatggttgatttatcatggtatagtacatgaatgagtctagaaggttcttgaatattagcttgattgatgagaccttgtgatgaaagcctgttggatatagttgtggaactcaggtatagaatttagaatgttgtgtaggcctatggagaattacatggtggttaggatttgattagacctgctaggcatatggatttggttagaatgatcaaggcaatagggtagagaatgttaggagttcctgcgttttcaaacctcttctacaggtttggcttttgtgttttgcttgagggcaggcaaaagctaagtctggggaagttgttatacctcgattttaacttcttttagctgtgatctaggtatatttttagaatctttttgttatttcaagagtcttctatagtcttttcaggtctttacatatttgggatggagattatggagcattttggaacaaaacagacaacttatgctgtagaagcaatccgcagaccaaaatccgcgtaggtgtcaagcgacaccaatatctgacggaaattcaatttcgctacagaatgtttccttattttcgaagaagatctacacgtttttaaaaacttatatatagatttttaaggtcatcgtttagacctaaccctgaataacttttgataacttttctctaccctttatgttactttgttttttgagagccaaaaccatgtggagctccttctagagaatatatttataaactctagtctcttattgtttcttccaatgatttctattttaaacattgaataaatatgtttgagtagttctcttgttgggtttagagattctcattagggatttagataaattagtagatcaaaaaccctgtaatgataatatatttggaatttttcatctttgattgttcttaatgctagttgtagagtaattaacttgaacttaattttaatacttagtatcaaacctgattataatgttttcttagttctagggatttacaagagagttgggatcaataatattaagcatagtgagtaatgcggcgaaccaccagttacactgtaatagtgatttgagttctagaatggttcgataatattcataatttactgctagatctactattcaaatattttctgagaagttctctaaacccgacgttttaatcatctgaatctccaatctcttttattgctttcttgtcttttattttcttaatattttgtgtttcgcttaattcgtaactattactctattgtgtgatctgagaaatttgtggaattcgatccctaagtgctataacaacctctttatttgatagagtagtcattaggataatttgactcatatcaagtcacctctgagactaatgaaatgaagaatagtgatgtacatgtcctacataattgttcaattaaagagttggcgagcctactaccaaggcgtcttcaactaatatttcaagaagttacttcatcataattggatcacggcatctcgaagatttcaagtgatgtactcatgaggaggagtagagacccgctgcactctttttcttttaaccaaagttttttccattgtttttttctggtaaagtttttaacgaggcagcatcgtctccaatgcgcttttgagatcacagttttataatagtcatccaagagagagtgttatgaataatattgtaaaatatgtggatgccaattatatggcccattactatattctagatctaaaaggttatagatgacttgatatatcaacttaaaccctaatgttgtatcttatatatatataggttgtatcttatgaatagatcttatgctttttttttgtatatttcatgtttatactcattaaactgattgatgttgtttagtattatcatttgagtgattataacattatacatacactttgtttgcttcttaagctgcatattcatatgaatagtgttgtaactcattaaaatttgttacaaaagagtagcatattgtaaccatttagagaagaagttacaaagtatttactaaataatacccacatatatgtaatttatttgtgactaacatcagcaatttgtgacgcttttgtaaccatttagcaactctcaaaattttattaagatatttactaatattaatttattaagtttaaataaatttataatcctaacactctaaaaaacagaattttcataatatactttataaatcttaaactaccaatatccaatttatgacataaaaagcatagcaaataaccaaaatttagcagaaataaaattaaaataaggaaaccctctcattggttgatcctaattcataaggattatcaaaaggtctatcatcaaccgttgatagagtccatctatgggacaaaattatccactttttttttccttctagttttcttcctcacgttacttcctcactttttcctcacttttctatttgtcaccttcttctcttcatcaacagttaatcaatgagtcatagaagttagttctatgaattaagatttctagtttttccaacacatatgtacatgtgtttttatttctcaacaaatcgatctcaatggaatgcatatttttccaggtttaaaagatattgtagttgatcgatatcgggtcttgtaccagactttggagatgaaagataatcaaaccttaactcaatctgttgtctctactcctacctcaacgctatagtgtaaatctccatttgtctgcctcaggtttgtctaagtccaccaattgctactaggtttgttttatgtgtttcgaaattaaattacctataatgcttttttgcccatattggaagaagattgcagctctgatctatactaaattagataccaaggactacgacggaatctcaccggttccattatttcttttttccttgattccactttggttccagaatctgaggcacatctcaaagcttccgccagtttacaaccaaaacaccaacacatctctaatcctccgcagctaaaacattttctttgaataacagaaaacaaaacaaagtacatcttgacgagcttgaaaattgcttatactaacaagaaaaggaagagatattcgaagaaaaaatatgaagcatgtgaaaattttagaaagtttgacacatattgcttagacaaatcataagaggatggaaagagacactgtaagaaaaaatgaaacaaataaaacgagtgcttgcaaaaagataggaagagtgataactctctgtaaaaaattgtgaagacagaaattcatatccatattgaaaagacagtcagaaaagtatgagttgttaaaagaaagtgtagatgaggttatgaatgtacttctagataatatcttatttttagaagagctatactaactaatggagcgaagataaacgaaaaacaatagtaaatttgcgggtaccaagatgagaaagtcgtcaaaattattttccatacaacaatttatttcatacgtaaaaaacgtcgttatcctaaacatctaaagataaagagagagtcatgaaccaaaaaaatgttcatttgataaatgttgtaaacgtaaaagttgtattaaagttatttttagttatgtatttaaattgtaactatttgtcatggtaattttaaaattcaaagagtttataatattaacaacaagtagacatataaaaacatatctttcaaaactttcaataaaaaatctaatcacacaaaaaattattaaaagttatacaaataaacccatgcgtagcgtgggttcataacctagtaatagttaaaaagctatgtcttctcaggatttgatctttatatatatatggtaagctatgtttccttaacgatcaaataaaaggttaagctttttccggattgatcattatatagggtaggctttacctaattctatacgagtaagcaaaagctagacctattgaattcttatatggaagactatgcctcctgatgtaggtcaaatagccctaagtttactccctcaaataagagatcgtcgttagtacttaagggtcaaattccataaagctcttttgttcacacaataggctaaaatatcgaaatagatgatagtagatctagaaatagttaggggttgtaagactagataataactaaataaaaagaaagcaagtaagcaaataacagattacggtgttgtaagacaagatactaaaaacgttaggtttcggatattcttaggaaatagatgatagtagatctagaaatagttaggatgtgatggaacagttcttaaactcaaaccctaattattgaataaccggtgatgtgtcgtgttactccctatgcctagggctaaagatccccatcgttggcttggtgaatctctatattaagagatgcatgctaaacgagtttgataagttcacctaggtagataggccgattcttattgcacacctataaacctggtgggtatacctattatttaagatcaagttctagttagctactctagaactagcattaagaacaactaaagatgaagaatcatacagatatcctagcactaaattatctaaatccctaatgagaaaccctaaccctaaaaagcagactactcaaacatggtggatgaaacaaacaacatgtataaataagaaagcgtaaacaaaatcgagagagaaagagttagaaaatatctcttcattgttattgaaaatctctgatgaaactctggaaacagggatatgaatagctttatgaaagtgcactagaacaagtaaggtggcttagaacttcttagataatccttaggtctaaacaatgaccttaaacctatatatatataacctaaaaacctgtagggactaataatgtaaataggaacgtcttctggggtaaaattccaaattttcaaactctgaactgtctgagacttttttgggccgcaactggtgtatcgatcgacaccaagagtatgtcaattgacactcttgacttgatctgaaagtgaattcgtccttgggcctattttctttatcttttgctctaaaatgtctctttatctccattcttgtcccaatccatagcatacttgaaaaagactcaaactttagaaataacaaaaagactctaaaacctataccttaaacataactaaaaacagtaaaaatagggttatattaactccccaagacgtagcttttacttgccctcaagcaaaatacaaaagcttaacccgcggaagaggttttaaaaccaaaagaacttccaacattctctagtctattgccatgatcattctaactaaatccatttgcctagaaagtctaatcaaatcctaactaacatgtagttctccgtaagcttacacaacattctagattccgtacctaagttccacaactatatccacctggctttcatcgctggatctcatcaagcaagctaatattcaaaaaatttctagacttattcatgtactataccatgataactcgaccattctctttttgttgtttactctttctctcccccagacttattcttatcagagataagataaagaagtactcgctacatcggataggcatcctccgcatatttttcaactttttgaattgatcattccttagaatgtaaaataataagatcaaaggaaacattcctaaccctttatacactacaggaaatcatctcaatcactttttttttttactaaagaggggaagagaacttattctatatgatttcatatatcaggtatgaacaaggagtcaagttctatgaatactaaccgttttgatgaggtaaaaggaagagcagtgagattagctacagccttaatggattgtgttggaaacaaggatatcctcaagtctgtcagttttccatttggattttccaatagtcggattgaatcaaacctgcagcaataatcaaccaggcattaatctaaaaaatacagatcataattcctaactagactaaataaaaatgttttttttcttttgcttttttttttatttttttttgttagaaaaagaaaattactcaataacataaaaacaaaaaataataagaatcaaaaaataaaagcatagttagtaggcacttccccagacttaaacaccactgtccccactggcattcaaatccgtaaagaactggaaaaatcaatcaaaaattcaaaaattaaagaaaaggaaaagaaaaatcataccagtgtgtggttgcctcccactaagcgattttttagagttaatagcttgacttggtggagttcaggacgtggatggagtgacaagggacttatgctgcttagcggattgcaatctcgccttccaaggtagtgtgtaaatagatcgactatgtgcagtagcatgtttcgatcgacactggtgttggtatcgatcgatactcactcctgcaagataatgaggaaacaagcgctcgagagtctcgatgcttggttacctgtgaacacttttaaaaaattctaaagaaataatcgaaggaacagtaggagaagagatagaggagtacatatcactgggaactgaagcagttgtgggctgtggaggaggtggagaagcatctgaatgtgaaacgcgatggtgtcgatcaacagggggtatggtgtcgatcgacactgcttctctacatctctcatctatgactgagttgtaacaagctttttagtcggctctggagttgaaatcggagcagccttaggaggtttgtccttgtttattgcaatgttactaataggcaatgtagattccgaaccatccatgccaaactccatctccacatcgcatatgttgagagatatcattcccttcttcacatcaatcctacctccaagtttaggtaggaaagctctatcaaggataagaggatccttgggttcttccttatatgccaagaccacaacatcctcaaggataccttcatggactcatttggaacgatctgcgtagaggagagtgatccgtgtcgagatgtagctagtcatgccttgcctctcagcaatagatttgggcatgaggtggatgcttgatcccagatcacacaaggagtgactgaatctgctagtagagattgaacaatcaagaacgacgctacttagatcggggagcttctcagtgctttgacctttggcaatggagctaacatgttcagaactcactactctcttggacatgtccttcttgaccttcgctaacagtatggaactgatatccctggtgagcaaatttgcttcctaagagtttattccattgttgaccaattatataaagaatggtccatttatcatggtatagtacaagaatgagtctagaaggatcttgaatgttggcttatttgatgagacccaacgatgacagcctagtggatatagttgtggaacttaggtatggaatctagaatgttgtgtaagcttgcagagaagtacatgttggttaggatttgattagacttgttaggcatatggacttagtttggatgatcatggcaataggctagagaatgttgggagttcctttgttttcaaaacctcttccacgggttttgcttttgtgttttgtttgaggggaagcaaaagctaagtctcggggagttgatataacccgatttttactgattgtatccatgttttaggtataggattttgagtcgttatgttatctctcgagtctttttggtgtcttttcaggtattttatgcaatgggacaacaatggagataaggagacattttggagcaaaagctaaggacgattttggttcaggaatcagcgaggagtgtcgattgacacactcttggtgttgatcgacactagtttcggcccagcagaagtccatgatgctttcaagtttacagaagaggaaatttaccccagaagacttccctatttgtattattagtccctggacgtttttagggttttatatactatttttagacctaagtttcttttatcaattcttttatcaagttctttgcaaaccctattgtgagagacataagctattcatcgattgttttcagagttttattaagatcttaatacagtgaaaagatccattctttccccttctctattactgtgtttatgctttcatactcaattatgttgtttgctccatccaatatgtctgagtaatctgcttgttaggaatagggtttttcattagggattcatatggtttagtagattgccccctctgctaggttatctgtagagttcttcatctatgcttaatgctagatctagagtaattaactagatcttgaatccagacactagatatgcccatcataggtatctgtaattggatctattatttgatgagtctggtttataggtgtgtaataagaatcggcctatctagtaagatgaacaattgaactcgttaagaatgcatatttaggttgatagtttctcggcttctccggttattattagctatagatatagggagtttcgcggcacgcctacctgttgttccataattagagtttgagtttaagaatagtttgatcacaacctagctttcattagatctactaaccaatagtttcgtgagaataccctgttcctagctctttattaaatcgtttacaacaaaatcaatctgctgttttcttactttgttctcttttattttcaatcatatcctgctagcttaatctcgacatttaactcactgtttgaacaaaagaactccgtgaattcgatcctaaaaaactgcaattgatctcttatttgagagagtagttataggtaatttgaaccatatcacatagtcacccaatcctcgttcctcttgactcacccatccggttctctgaccacttgctcatgactatctcctaaactgccagaccgttggtttgacgaaacaatacttgtcccgtaaagacttctttcgatcgttccgattgtacggcttgctaaatcgtcgactacaattcctcggcttagtcctagtcctgggcaggggtattacattctcctacctttaaaagaattcatcctccaattctaaggactaagagacaactctggtaaccactaaaagactaaaagggttctaacctaaatagctagggtttccctaatacactcagtgagttcctcaacaatcaacatgcaagcaatataaaacataaatcaagcaaacatttgcacaagaacaagagaagttagaacccatacgtacctcaatgggatcttacgatcatgaaaatttcaggataacctattcctaaccttataaaaatacttaggaaggtttgccgctccactagctcctgaaaaactagacaagccggaatgcaagaccactgaagcctacttacttaaatatgatatgaccaccacgcatccgctacacataagttaatatcgtagggtattgtgtccggcgatcataatcatcatcctcttcactcctcagcttaatggtctccacgaccgtctctccttcataaatctgcaaccaccatccaaaggtaatcctaactaaactacctaaacctatcacatgaaaccgttttcctaaatgcttttgcgactcttttgactaaatgaaacatctgaaaaatcatcccacgtcctcaaagcatcatgaaccatgctctgataccaaccttgtaacaaccccgaaccgtcctagaactaagaataaattcgaaagcatcacgtattgttggcgaccgcccgcagacaaatctgacaaaagatcaccgaaggccaagcccgaccacaaaagaccgtccctcacgaccacatgacttaaaggctttgcaacccgtactacgaccgcaagttgggattagtacgggctagactaatgagaggatacacgagagttttaacaaaagccgatttcttattcatatattatgtattgaaataaattaccaaatacatgtataggttttcggtacgaaagccgaagctcaatcgagtcatatatacatactagtttacaaaaatacgattttacaaagtcaacgcaaaaactaaaccggcttccctaacatccatgcttaaaataaagtttacaactaaggttacctgcaaaagagagtgggggatgagcgctactcgcctaatgagtcctagctccctctaataggcaataaatccccaacccaaaacccaaaataacaagcagcatgcagaagtataacaagattgaaagcataacctcaagcaatcaagaaaataaacaatcaagaaaataaacaatcaagctggttatcatgagtatgtcgactacatgtaaccacatgaccgcaatcctgcataaatagaaacttaccttgattcggctgaacggtttagactcgatctactcctaatccaaactcagcctccaatcgcctaactaatctactcgacagatcctcgacattacctggaagctcctctggacaaactagtcgtatctgactctcaacactcgctcacatactttttagagagattctaggccactcattctacctagctactaacacaactgcaacactctcgatcatacgctcggtccgagcaattaaaatccccgatcatcaagcacgatgtacatgatccaaatgcttgacaaatacatagcagcttgtttggaaaatagtacataagcagcgcctagtaagggatgaaacacatcccacgcactcggggacattaccgttaccaactgtgatcatctcgtagaaccgtaacaacgacgggtttacgcgttccgtcaacacatcaacacattaatcacagtcacccaaatcctcggtcctcttgactcacccatccggttccccgaccacttgctcatgactatctccaaaacagccagatagttggtccgacgaaacaatacttgtcccgtaagaacttctttcgattgttccgattttgcggcttgctaaatcgtcgactaaaattcctcggcctagtcctagtcctgggtaggggtattataatacctatctaatgaagcgagtattccgatgtctaatctccaaaaagaataagtctggggagagaaagaatacaaaggaatgattgcgtggttgatttatcatggtatagtacaggaatgagtctagaaggttcttgaatattagcttgattgatgagtctcaacgatgaaagcctgttggatatagttgtggaacttaggtatggaatttagaatgttatgtatgcctgtagagaattaaatggtggttaggatttgattagacgtgctaggcatatggatttggttagaatgatcaaggcaataggctagagaatgttgggagttccagcgttttcaaacctcttccacggatttggcttttgtgttttgcttgagggcaagcaaaagctaagtctggggagttgatatatctcgattttcactgcttttagttgtgatataggtatggtgtttacagtctttttgttatttctagagtgttctatagacttattctggtctttaaatatttgggatacatttggagattatggatcattttagagcaaaacagacaacttatgctgtagaagcaatctgcacaccaaaaccgcgtagatgtcgatcgacaccacccctggtgtggagcgacaccaatatctaacgggaattcaatctcgccacttactgaagttttgaagatttccaaattcgccgtagaatgtttccttattttcaaagaagttcttgcatgtttttaggaacttatatatagatttttaagttcattgtttagacctaaccctgaataacttttgataacttttctttaccctttattttactttgttcttgagagccaaaaccctgtggagctccttctagagaagatctttctaaactctattctcttattgtttcttatattgatttctactttaatcatgttttgttctttgataatcatgtatgaatagttctcttgttgggtttagggattcccattaggggtttatatgaattagtgaatcaaaaaccctgtcaagattatatatttagaatttttgaattttgattgtttttaatgctagttctagattaattatttagaacttgattttaggttaataggtagtacttaaaaaggcatatatgagcagaactaccttagatgagcctagtatttagatgcagactagcgtcgatttagatacttaggtaaaacttatcaaaccggattataatgcttgcttagttttagggaattacaagagagttgggatcaatactattaagcatagtgagtaatgcggcgaaccaccggttactctataatagtgatttgaaatctagaatggtttgataataatcttaattttctactagatatactattcagatatttcctgagaatttttctaaacccaacgttttcatcatctgaatctacaatctctattattgttttcttgtcttaaattttcttaatattttgtgtttagcttaactcgaaactgttagtctattgtgtgatccgagaactttgtggaattcgatccctaagttgtataacaacctctttatttgagaaagtagtcattagggtaatttgactcatatcaagtcacctctgagaccaaggaactgaataatagtgatgtacgtgtctataaaattgtttaagtaaagatttggcgagcctactaccaaggcgtttccaactactatctcaagaagttacttaatcataattggatcgtggcatctcgaagatttcaagtgatgtactcatgatgggtagtagagacgcgctgcactctttttcttttacccatggtttttttcattgggtttttctggtaaagtttttaacgaggcatcatcgtctcacatgcacatttgagaccacattttcataatagtcatccaaggcagagtgttatgaataatattgtaaaatatgtggatgcctattatatggcccattagttataaatgacttgatatataaacctaaccctaatgttgtatcttatatatatataggttgtatcttatgaatagatcaataacagagaaaaacagttctctaaaccctctttttcacaacaagtctcaagttttctatattgatttggactactatggatactaaatcattataatgtataccaaaaaaactttatatttcttataatattaactagtggttttgaaatttcttaagttctttatattaactagtggttttgaaatttcttaagtttctttgtaattcatctttatacccattaagttgattgatcttgtttaatattgtactttgagtgatgaaaacattaaacatccactttatttagttcttaaaatttaattcacatgaataaagatgtgactcataaaatatgggcacaaaagagtagccctttgcaaatatttagagaaaaagatacaaagtagtgactaaatacccacatatatgtgacttattagcaactaatattggaaaattgtgacgcttatattactatttagcaactttcgcgattttattaagatatttatcaatagataattgttaatatgttaagtctcaagtgttctacattgatttgaacttctaaagatactaaatcattataataccaaaatatacttagttttcaatgtattatgcaaaatttctaaacttaattaagtgttatatgtgtaatattaagtcatggttttgaaattttcttaagtttctctatatatttcatgtttatactcattaagttgactattttttttcgtattgtagtttgagtgattacaaaattagacatacactttttgctttttgcttcttaagcattacatttatatgactatggttgtgacgcataaaatattgtcacaaaagagtagcactttagaactatttggaaaaaagttacaaagtagtcactaaatactcttatatatgtgacttatttgcgacgctttttgcagtttgtgaggttttgctaccggttagcaaccttacgattttattaagatatttaccaatagataattgttaatatgttaagtctcaaattttctacattgatttagatactaattaaagatactaaatcataataatacaaaagaaaacttaaagttttcaatgtatgaaacaaaatttctgagtacttacataaggtttatatagtattaactaatggttttgaaatatcttatgttttttttgtatatttcatgtttatactcattaaacagattgatgttgtttagtattatcatttgagtgattataacattatacatacactttgttcgctccttaagctgtatctgtaatttatttgtgactaacatcagcaatttgtgacgcttttgttaccatttagcaactctcacaattttattaagatatttgctaatatgaatatattaagtttaaaaaaatataatcccaacactgtaaaaaccaaaatttcataaaatactttataaatattaacctccaaatatccaaattatgacataaaataaaatatatagaaatcttctcattgcaagggacaaaattggttgatcataattcacaaggattatcaaaaggattatcatcagccttgatagaacccatccatgggacaaaattatccctttttttccttccagttctcttccttacgtctttccttcctcacttcttcctcacttttctatttgtcaccttcttcgcttcgtcaagttaaagattaaatcaccgtcaattaatcaatgagtcatagaagttagttctacgaatttagatttctagttttcccaactcatatgtacatgtgttttaattatttctcaacaaatcaaatctcaatagaatgcatattttcccagatttaaaagatattgtagctgatagatatcgggtcttgtaccagactttggagatgaaagataatcaaaccttaactcaatctatcgtctctactcctacctcaacgctatagggtaaatttccatttgcatggcttagttttgtctaagtctacaaattgctactatgtttattttatgtgtttcgaaattaaattacttagaatgctttcttgcccagatttgaaggagattgcagctctgatcgatactgaaacttataccaaggactatgacggaagctcactgcttccattatctcttctttccttgattccgctttggttcttgaatctcaaagcttccgacaggttacaaccaaaacaccaacacatctctaatcctccgccggcgccatggtgttgttctccgcctaccatcgctgctttgtccaccaagtgtttccaatctatagatatagatgtgtattgagtatatatatgtgataaataaagttatttgttattgtaaattaatttttgattgatttaaaaaaataatttgttttttttgagtaatttgtttttgttgtttgtcgctaaaacgtcggtactacatataagttgctatattgtgacgatttgataatagtttcgaatgtgagactattatagtcgtctcaagttagtctctaatttaagactgcaaatagtcacaatagagttactaagactatctacaatggtttacttattcaacacccaattttttactccacatcagcttctctctcttccacctaatcatccaagacctatttcaattttaacctttacaatagttttgtttaataaaattaaacactctaccccacttttattttattttatttatattccttttcttatttatgttttttacttttataattatatattaataacaattaacgattaaaattaaataaaacataattaagagttaacaattttttttcatttaaattttagattcttaattttttcccaataatatataaagaaaatatatatattcattatgaagacaaataaaattacagaaaacataaattgcaatacaatatattaataaacaaacgctacaatttaataaaacagacaccatatttaaataaaacacacataacttaattaaaacaagaaacagacacaattttaaatcaaacataaagactttaaaatctttttatttaccgaattttgtccatatgtgtttcacttaatttgcttgcaattcatgatgtacatattgaatcacgtaacttagatctagcatgcacatgatttgcaaatgcatgtagaacctcggtcgagaatggttgcggtgtactagatccactttccttagattgatcatagtcggtccagtgttgagcatatgtatctcgttcattctcaacaatcatattatgcaatatgatacatgacctcatgatgatagctaaatcagctatgttccaaattattttaaatcgagcatgtaatactccaaatgcacgttcgatatctttccgacatccctcctgaagttgtacgaataacttgtctggttcactctgaggaagtctaatggacttcacaaaagttggataagacggatagataccgtcagctagataatatgccatattgtattgacgttggtacacgaagaagttcactcttggagtatttccttgttcaatgtcatcaaacactggtgaacgatctaaaaaatttatatcgttcaatgtgctcgcacacccgaaaaaggtatgccaaatccataaatcatgagatgcaactgcttcaaaactaatagtgctagttcccttatctccccgagtaaattgtccttcccaagctataggacaatttttccgtggaatagaggaatatagaggtgcttgagatagatatgacattattgatccataatatggctgatagtttggaacagttgacggcatgaaaatttttggtgaaaacccataatttggtatattttggggttggttggaaaacaaattttgaaattgataattgttgggatttgggtagttaaaagggttattagaagaattttgggtgtttaaagggttattgttagaatccgttttataataagaggatttttttttatgtgtccaaatcatatgaaacaagtaattatttataaatcttaaaaatgatgaatttttgtataaaaattttgaagtaacaaaatttatattataataaaataattgagtgtaaataattgggatataaaaaatacgaaaatctgagtaaccaataagaaaataatacttatatcactaccaaaaaacagacatcttcgctcatcaatttctccaattacggttcaccatgtagcaacataggtcccattttttttcttaaacatgttgaattcattcaacacaatttaatccacatatacttttcatattattcaacaccttcactgcattcattaagcagttgattttttttgaaacaggctcattgtaaacagtctaatatacgactaccaaataatgtctcatttaagtcgctaatatcctgttagaaatgtcctgaaatcagtttactctaattaaatttgtaatgtcaaggttttacattcgtataatattaggtggttataatgttttggtagagaccacttataatttatgagtcagaaactcattgttaatattatacgaacctacagggtcacacacctaagcaaattggatcaaactatatataggtttaatttggattaaactaatattggagttttaaggttttatttatttattagataaattaaataatatgtattttaaatacacatacattcatatattgatatgtcatagatgtgtaatccaaattagatttggagtagttgtcaaaagcccatatgccttcctaattcgattatgttaatatgatctcatataaaggcaacgtgatacatatatagagatagattttagagaaagtttttctctagagaaaaccaacaaaacctaaaaccctaaaaagaaaaagacaaatagtttatctaagttttgagattagatcttaaaggaactaacattctagatctgatccagtttgtgtgcgtgtagatatcggtagaggcacaacatttggggtgctaaaacaaccttgatataatatggtttatctttccgctgcaaaatatccaggtataatcaaaccctaagatctagatttaattctttgtttatttccgctacagaatatccttgataaaatatggttcatctttacacggtttctggcaattgaattcgctattagtatttataaatcattataaacttgtacgaattgcttcatatccgaccacaaatagttgtcaaaaagtgtcacaaatttgagacaattttgtgagtactttattttgcaaccaaaaaagcgaccatatttttagtcttaatgtagtcgcaaattattgttttgggactgattcaggatgttttccagaatcacaaactgcttgttttcttatagtgcgaaagaacatttctcgatatcttattcactttcatcatcgaaacaaccataactactttctcatactagtaagtagcttcataaagcttcatcatttcgttaaatgggtgtggagtcacaagaaacccccaatcaattcaacttcttatttagagcttctgcttctttaaccattttcttcttcacattagcacgaagaagcggaagataagcagattttgctactctcgacgaggcagaactatgtactagctactcaaaatactcctctgcttgtttcaagccatgagttttgatgatcaaatccaatctaagagcaatgtcataaacacgaaattgaatatctttttgattctccatccacttcaacatctgtatatacacaatattggcaaaaccaaaatctgaaacttccataaaaaggttaaactctcagtttaattaagcgagaatttccaaacctctagagcgagatcgtaacgattagaacaaatgagacgcttggagatcaatcagagctccaataacgagatgtcgtgaccaagttgatccgtttctgaagcagagaggtaacgttgcctcgtggacagttctttctaaattgtagcgcctcggtttcgaaaatatggtaatgcatgtagagaggtttaaaagaatttagtgttttgttaaagctaaatttggatgcttgctaagttaaatttcttattcatttggctttggattcattttggcctattgggaagttgaacacacatattttcatcaattgggtaatatatatatcccttttcaaaattttaaatcacaatatatgcaaaacaaaaaaaattatgattatttttttaatttgagatattatgtgatgtttcaaaacatttaaaaaatgtttaataataggagaattgtaattttaaatcttaagcaaatcttctaaatatttatatttttatatatggtataaccgcttcacaatttataattttgtatatatcttacccgatccaaagaaaaatatggatatccgatgtgagattttgaagtacattcgatattaagtcgggtaccaaatttgttgtatcacaatttaacccatccaatgacaaatgtacttcgaaaatactataattaactataaagattatgtctctctcttatttctctcgaattctttagagagagaaccaccccttgattccgattgaattcctttagagagagaaaggtcccttgattccgtcttgatctgaaagtgaattcgtcctttggcctattttcttctgcttttactccaaaatgcctccttatatccattcttgtcccaatccatagcatacctgaaaagactcaaaaacatatacctaaaacatagctaaaaacagtgaaaatagggttatatcaactcccctaaacttagtttattctttgccttcaagcaaaacacaaaagccgaactcgtggaagaagaacaaaggaactcccaacattctctagtctattgccatgatcattctaactaaatccatttgcctagcaagtctaatcaaatcctaaccaacatgtaattcttcgtaagcttacacaacattctagattccacacctaagttccacaactatatccaccaggctttcattcttgggtctcatcaagcaatctaatattcaagaactttctagactcattcttgtactataccatgataactcgactattctctttctttctttttttaattatttttatcctccaaacttgttcttttcagagataggataaaggagtactcgcttcatcggatagatatcctccgtatatttttcaacatttgcaattgatcattccttagaatgtaagataaaaggatcaaaggaaaaattcctaaccctttacactacaagaaatcatctcaatcacactttttttttatattacataggggaagataacttattctatatcatctcatatattaccaggtataaagaaggagtaaagttctatgaatactaaccgttttgatgaggtaaaaggaagaggaatgagattagctccaaccttaatggattgtgttggaaaccaagatatcctcaagtctctcggtttgccatatggattatccaatagttggattgagtcgaactttcagcaataatcaaccaggcaataatctaaagaaatacatatcataattcctaactagactatacaaaaacgttttttttttctttttgttttcttacctttttgttagaaaaaaagaaaagggaaattagcaaaactaaccaacaaaaactttatatttgaaaaactaacacctcaaactatatgtgatgtaatttatataataattccaaacataacatgtgcgtggtttacacgctctctttcttcttcattctgcttctttcatctcgaacttatattgttgccgctgtgaaaattcaaattgagggtgaattgcagagaatttacaatacccaaaataaagcgtggatacataaaacgagcaacttgggaaagtttcgaagagtgatatagatcgacaccgttagagtggcgatgcaagggtatccggtttttcgatttgggggtttcgcataacggcgacagggctggtgacggtgaagtcgagtaagcaacttccgggtgtgcaatttgtggcggggactatataatcgtcgaatttgagttgcgactagggtttgtgcattttgcatttgggggtttctaattagttagagattaactctgtttgggttgatagaagtgagaacagttggttctatttgtgacggcacctatacgaacatcgaatttcaggaaacattggtggattcgaagtgctccatcgacaaacgtgattgtcttatcaaagtttagaaagtcggaggtatgagttgaaatatttagtctttgtcacaaatcattgatgaactgtattcaataatttcctaattgatttgtgtgtttaattatgtggttttttcgctttagcatttgctgtcatttgttgttaaggtcggattgtagtgttaagttaagcgtgtatgtaatcctgaaactaatggaaagatggctacatattgcatgtgtggtttaaccacctatatggtgagttattgaacatttagtgccagtttagattacatgatttgtatacatctgttttgggtatctcgtaagcgaaaagaagtgataatggtacctttgaatttcagggtatctgttaaatgggggatgatgagttgacaaagcgtttctttcggctttgttctgaacccgaaggtcgaaagaggataaacaattactttacacttaggtggattgagattataaaggctgcactagatgaagagcattttgcagaatttggatggttccaaatttcgaagtatcttgcaaatgggaacccatcgattttctgtaatgttcttgcattacattctatctagacagttggtgacaaataagaagtatgagatgcggtggttgtttgttgggacaccaattcacttttgcattgatgattttgagctggtaactggtcttaacttcagcaaagctgacttcaacaagaaggatgcaagaactagagggaatgtgaaagcggttcagaatcctacaagcttctacaagtcactatttggtaaagagagaaagtcaacttcaaaatggattgtaggaaagctttctatggggaagaaatacaaagacccgctaacccggtttcgcctagccttgcttctaatagttgatggaattctttgcctgacatgtgcgggaacaatcttaatcctgaacatgtagagatggttaaagatgttgttgcatttcttaaatatccatgggcagaacctcgtttctttctacaattagaagcgcaaaacaaagaacaaccaaggaacttccccaagatacaagagccatacaagggttcccgcatgcgttagttcttgtgactgttaccgcatgtccagctatcatatacacgttggactcggttattaacatactagacccaacaatttcagttgagaagctggttcagtctgttctgggaaggagcttgaatatcaatgtgcatgacgtttgcactatagaccaaaaatggcatggtaagttcttaattatgtagactgctacttgattttggtattaaaattgtatgttcatgccttaactatccaatttcaactttatattgtatgtcagctacttgattttggtattaaaattgtatgtgcatgccttaactatccaattcaactttatattgtaggactgggtcacatcactgctgaatgaaaaactacttgcaaaagatatcgacttatctttatctgatgaggaggaggatgaagaagtatcacacctgctatctttaataatagaggagcacccatacgagcataacagttggagtggtggcatggacgcttgtgatattgtacaaccatctgatgatgagttcttgcagatgatggtgtgaattcgtctaagattgatggtgaagatgagatggaggctgatgtccatggtggtgctgcagaagagagacaagagggtgcaaccggtgtatgtgaagacggcatgggtgttgatgttcctgttgatgatggacaaccacaaaaaaatgatgacagtttttaggctagagaagatttgcagcatgatgtcccgattgctggggaaaggcaacatagtagtagtgcattgatcaaagaggcagctgatgaatttgaaaaacgttttctcaagattcaacaggcgaacacagttgacttgaaggcatactttgatgctcaactagataagcataagaaagaattggtggcaatgattgctgaatctgttagggaactggtaagtgggcaaaatatacaacatgctcaaaaaggggaatgcaacaaatgtgtagcagagtcatgctctacaaaggttaagttaccttgatttgttgtatatgtcttagaaaactgaacatttatgttccattccattttaagtgacataatatacttatgttacaattgcaattcatgaaataggaacatagaagctctgaccagccaaggcatacgcatgttggttcccagccggatgaacttgatatttggctacctggaggaagtgacagtgtagcgggtgtttgtggcataactgatggattaagtgtgtcagatggcagcaagagtatctcttaaggaggttagcatacggtaaagactgttactcatttgttttaatgagtaaatatgacatagaaatgtgatgtactactaggtctgaggtgacgctgcttctcaaaaaggacggagaaaaaaatccatttctgatatggacgcccaatctacccggccacctaaaagagctaaagagaaggagcaggtgtcaagcagtaaggtattactatatccgtctgtatatttaatccactagcacttatattttttgaatgaaacccacttactttctctaattgaatattacagattagaaacaaagaagaattgcatgcaaccaacccggtaagccatgacaaagatgttaaactataggtaaatgatgtatatatgctaaactatgtacatgggtatatgtatgcaggatattgatgcagaaaagaacttggaagatgattgtgatgttattgccccaaacgttttgttggcctaacgcaagaaattgttgctgacatcagcaggttacctccaaaaggtaagaagaagacattccccacaaaagtcatagtgttgcggtcgagcgaccggattagggacagtcctgtcatgtacaacagaagagagagtcggcctaccattccggtacagcagcgacaaacacctgttagagggtcgactaaagttcatgttgttaggccaggaaaaggggagaagatacctccaaatccaccaccattggtccatatgaccgattcgctgttccaagtgcagagagagtgaaatgttttcttaaacaaatagaacggagagtgtaagtatttatagcccctatattttcagaagaacttatttgctttcgcaactaacttgctggtatatggtaccatgtagatcttattttcaggctgatggcgttgtaatggagaatactgaatttctaactatttacgaggcgcaaacacttctagatgaagtagtaagttatacatgcaatctgtgttgtttcaaataaaactgtgtgctcactgcttttttagtagaaaactaagtattaaaggtgtgtgctaataaaaaaagtgacttccacaaggaccagatcttttagtgaggttcattcagatgcggcgggataaaaagaagccgctgcattttgattttctaccatcaagtttcttgtcagagctacgacgccaatacaacaaattttgtgcagcttcaggtaagagagttttttacttcaccacgcttacaagagtcccatccatggtgcgaccaaaatggtttgatgaggttgatgtcatctactgcccaatgcaggttgagaggcagcattgggttgggcttgtcatcgatttgatgaaatagaaaatcattgtattagactgcaagagtgaagtgttgaaagacgagcagttggcgaagtacatagaacacataaaatcatgctcttgtaccttattcaaaagcatggtgtaaacggaagaatgctaacatagaggctcgatcttatgacaatgagtagacccaacttacagtttaattgttcgtcgttaggtatggttgtctttcattatcttgtttcgataagtatttcatatttgactgtgtgacatatatatttcacgtgtgattttcaagccttgttggaattgcttgtgtgatcttacttgagctacattcagttaacgctatggactattgtgctaaactagacgaagagaggatgcgaggggcagctaaagagtacgctatcgaaacgttcaatgccttttctccagaagaacgtactacttgagtcttacaagtgcgaaagctgccatccaaccccgaatgttcttatgtaatcagtgactctttgttttttaaattcaccaattaatagcgatgtttgctatttagccatgttcttaagaagattgcagaaagtttgtattataagatacatgagataatattttcatgttatgtgaattctagattaaggattttgtaaccaaaatgatacttattttccccacattatggttactcaacttctttaaatctttggtaagtgcattatctgaataatacataacacaaaagggaaccaaatcactacaacatgcgtatcaatacaaaacaaacacaactacaattactacaacacaaacacatagacaagagtcatcaacactttacacacaagaatcttcttcaacccacgcaattcaatcttgcaaccttgaatctccttctctaaacctagcagctccttctcatagccgcaaaccacagcttcacatgtacgagtctccattgccagagtttccatctcaaattctaaagcttgtaaccctttttgtaaggtcaatgaagccccttcaagttcatcaatctttggaagtatgtcttccatctcttccaccattacttcatctgtcaacctaaacaagtgaccactaccattctgatacataccaaaaacacaattcagacatgttccataatttaacagtacttacactacaatatcattacctcctctccacatcgacaagcataaaagagtctccttggatttttcacagtttttgatgtcctcaaaaccacatcctctccacatctacatcgacttggaatccctctccctctatcacccatttttgtttcactctctcgtctcaatttctctctcgcaaaacctctgttttgttatcgataattgaagagataaaccctaaatacagattacccccacattaaaacgacgacgttctatcttgtattgtagcctccattagtagaagtaaacactctcgcttccgcagagtaggcgagaacaaccattattttgccaaaaccagaaagttacttcataacaccttatagcaccccatagcagtagttggcgacttacatagcattacggcaggaggctttgttgtggccaacaccacaacaacgtgaacacctcctctgggaactggatttgttgcactgcaaattagaagtatagaagctgttagcttttaaaaaatagaatggactatgtactgttttaatattctgaacttgccttgaattcaccacgagacaatattcttatcttccttggtctcccaggtggccgccaaacaaatggtggatgcacctcccctatcgttcctgaagctattccgggtgcgacctccccaccaacagactaaattggatagcttttctcctcgtaacttagcttcactaactcattaaaatattcgtttgctgccaaaaaatctgtaggaactccaagccgagcagcaacttctattgcgtgagcacaatgtatccttaaaccctgaaattccaagcaagaacaagtagactcgtccaatttgacaataaaacattcaccagtccgaacttggacctgaaactcgaagttgcaaattggcttaatagacattgacatggcgtcttgatagttttccttaactctttcctgcactctcggagctaaagtggtagtcttcagcttcagcccttctagtagcaaaccaatccatcaaagttgttattatgtactccaggatgtaaataagtgggtactcgcgtgcctctttaataacgttgttccatgactcacatgtgttactattcataatattgaaacgctagccttttgaatgcactctggtccattctgtaaaccctatacacattataatatacatggttatgtaagctacaatcctgtcaaccaatttactataactatatggaagctgaccaatataataacagagagtcaaacaaacgtacccaaatcaactaaatatgcagcacatcctgggtttaatttttgtatcttcagaaaaatccgattgaaatcagtgacatgaaacgcttgtgctgcttcaaacattagtcggcagaggctttttggcttgtagagatttttgacattccaccaaaggtgaaccgtacaagcagcgtggttggcttgcgtatagacctgatgccaaactgtacttgtcaattgtgaaccagattctatatgtaaaataagtacatctctatcggtatactatttgccccaatgcttcaaagcaatgttgtttctcaccttactcaaccccgtgtatatgctaccatgtctgtcagatataaaaaataaatcaggattgtcaggagctataatgctgagccgctgaacaaaccattcaaaagcgctaacattctcactgttaacgataccaaaagcaattgggaagatctgaaaattcccatcttggcaacatgctgatataaaacaaccaccgtctctaccgttcatagatgttccatcaactacaatgaccttccgcatgtatgcatagcctttaatagaagcagcgaaggcgatgaattggtatttgaaacggcgtggaccatttggctcatcatcagattctgtaaagcacagactccctaggtttgcttgctgaagtagcctagcgtaagcggggattagtacgtagctgccgaccataaatcctaatgacttctccattgccacctctctagcacgccaagctttccagtaagatatattaacatgatagtcgtcaagaaagaacttctttatcactgcagcatttggcccgcgtttaataccaagaaagcgagattgcataatttcccttattacttgagttgttgctaaatggtggtggtggtctctacacctttgatcaatagtgcatgtgtgtttctgatttgcctgtcgcacttgaaagctgtctgaagaatcaaccttagaagcatacacccgccatggacaagtcctcgagatgcatttcaacaccataaactttggagtagaacgcgcacttcgaaagtgaaacttgcggttgatggcgtgtataacaatcttaatcttgcaatcagacttggacttaaatactatgccaacaaacagcttctctctttcgtattttacatcaaagaaagcagagcccacacctgaaacaaaatgaacatctttcagcaaatgtatgtattatgctacttaaatagaaccagtatgtctaaataaaatggtatacaagacataaactattttaacgaactagcaaattcaagttcttaaaacaaatcaacaaaacaattatatatgtatagccagattacaagttataccttcaccttttccatcattaaagactagtggggcgtctcgaccgaataggataggctcatcactgaaatcggagaggattgtgtttaaagcgtcttttgcccgcccccaaaacataatgatctgcctttgaatttcagtttcttccacatcatttgtaataggagaaacatgattgccaggaggcctgccaacatcagccctatatgaatcaacgccttctaaatcatcattttctggaatgtggtcagattaggttgcatggtgaatggaacgatgagaaaatcctcttcattctcgttgtcttatgtcccacttgctctactaggaccagccttcgttgacttagcacttttgtccatgattcctttccctttgttagtaggtccacattcagggcttttaagccggatgcagtcttcaggctctctaatactgatgcctcttgcgggaaaaacttcccgcctggtaatacttcttgactcttgctttgtctcaggaggcgttgggtcttgcgttgcacccaccaaggcactatcaaaggaaaattggtgcagttcttcctcagagtcataatatgtttcctcactgtcctctcaattgaagtccttgcatgctacatcaacaggagaaattggaatagtatgttggactatagtaacacagagattgacctcttctatgtgacgtctcatttgagtgaacattgtaaaatcactatcttcactgatgtattgaagaggcgacccgtttccttcatctatagccatccactctggatattggtaagcaattttgattgtgatgtctcttgcacgaaaagaaaatttctctttcaccttctgagctagctctttgtacgtcatgttggtccggaggcggatgtacgacgatccttccacagtcttaggttcaaactgccaggccaaattatcaaccctcaccgactcgccaataacaaacaagacttcatcttgtgttgccgtctacatggcgtatgtaaagaggtcattaggatttagaaagagagaaaaaacaagtaaatataaatctcaacaagtatgcacaattttcccatttaactaagcgtggtcattaatttatcagtaaaaccgaaagcacgtatcaaggtcgaattgtaaaaaatcctaacaacttgtttatcagatctacaatcatggtaagtagtttatttgaaagggaaagtaagtactttgacatggaaagtgttgaatataaaattaaatcggcagaaagtaaaaacaaaaactggaaaccgatggttttgtacatttccagtttgattctcatattaactgccgaactattttcaccaccatcaatactgttctgtttacaggttgagatctgtgcgtaaaaagtatagcatttactgtcaataattagagcatatttttttctgatatttttggggagagtattttattcaaattaaacttagtgcaggctatgttattgatgggacaattctgaagcgttgctatggaaaattttttctagcttcaacaacgtcagcataaatcagtcctaattctctctgcctcatgcacgtccaagaaactgcaaatagttgtgttaagaattgggttgtaaatacaaactccagttgcgttactcactacattttgccgattatagtgttacttatttaataacattacaaaatttggttattgagctaactcacccaaaagaaaatgactcaataacataaaaacaaaaaaataataagaaaaaaaaataaaagcatagttaataaacgtctccctagacttaaacgttactttcctcggtggcattcaaattcgcaaagaactggaaaaaaatcaaaaattcaaaaataaaagaaaaagaaaagaacaatcctaccagtgggtgattgccgcccactacgcgcttctttagagtcaatagattgacttggcggagttcaggacttggatggagtgacaagggacttgtgctgcttagcagattgcaatctcgccttcgaaagtaatgtgtaaacaaatgggctctatgaagtatcaggtgtcgatcgacactagtgtgggtgtcgatcgatagtcactcctgcaagataagtagagacaacaatctctcgagaatctcgatgcttgtttaccgttgaagcacacttcaaagattctaaagaaataatcgaaggaatagtaagagaagagatagaggagtacctatcactgggaattgaagcagttgtggactgtggatgaggtgccaaaacatctgaatgtgaaaggcgatggtgtcaatcgacaagaagtgtggtgtcgatcgacactgcttctttgcatctctcatttgtgagctgagctgtaacagcctctttagtcggctttggagttgaaatcagagcagccttaggaggtttgtccttgtttgttgcaatgctactgataggcaatgtagattccgaaccatccacgcaaaactccatctccacataacatatgttgagagatatccttccattcttcacatcaatcttagcaccagctgtagctacgaaagctctaccaaggataagaggatccttgagttctttatcatatgccagaaccacgaaatcagaagaaaagaggcaattaccaactctcacatgaacatcttgaaggataccttcaaggactcgtttggaacgatccgcgaagaggagagtgatccatgtcagtctatagctagtcatgtatagtctctcagcaaaagacttgaacatgaggttgatgcttgatcctaaatcacacatggagtgactaaatctgctagtaggtattaagcaatcaagaacgaagctacctggatcggggagcttctcaatcctttttatggcagtccaatgtctggtaattttccttacaacagtccatactttagtggtaattcatggggtcaaacttcaggtggccactagggtacaccaccaaatgctccacaatggggatagcccacaaatgctccacaatgtagtacaccaccaaatgctcctcaatagagttcatcaacaagtgttcaacaatggggtacaccaccaaatgctcataaatggggttcatcaccaaatgatcgacagtagtgtaattcaccaaatgcttcagaatagagaacacaacaacctacgccaaattggggtacacctttcaaataggccacaatggggttcttcgtcaaatagtccaaattggagtacttatcaacaatggggttcatcctcaaatgtttcaaattgggcctcttcaccgaattcttcacaaatgggcttctccagcaaatgttcaatgtggattttcaattggatttgaagatgaaatcacaccaaatattcaacacatagattgtgaaagaataccagctcatacttcttcagcagagcaaataccacgaacacgtagagcatggagattattcaatatttggggaagaaaacgaggacatagtccctgtttgtttctccatccaaatgatccatccaaatgaagatgaaaaatgatgtttgtttttgacaatttaacaaacatttggatggatcatctggatgatacatttgaatgagtttataaatttaggcaaatttatgaaactcatttggatgaatttgattgaaccatttggatggagatggttcattcaaaataacaaaagatagatttaccctcatttctaatcataatttagataatgttattttctataaatttcttatttaatatttttaaaattacatattgaaacaaaaaaactctaaaaatcatgaaatcacggattattattttatgtaaaaatcgtaaaatcgtggaattgagtttttttggcaaaaaccgcaaaatcataacatcatgtttttcgccaaaaccgcaaaatcatgtttttccgccaaaaccgcaaaatcatgttttccgccaaaacgtaaaatcatgttttcccgccaaaatcgcaaaatcatgttttcccgcaaaaacaaaaaatcatgttttcccgccaaaaccgcaaaatcatgttttcccacccaaccgcaaaattatgttttccccgccaaaactgtaagatcatgtttccccgccaaaaccataacatcatgttttcacaaatccgtaaaattatgttttcccgccaaaaccgcaaactcatgttttcccgccaaaatcgcaaaatcttatttcaccgtcaaaaccgtaaaatcgtgtattctcggcgaaaccgcaagatcatgtttcctgccaaaaccgtaaaatcatgttttcccgccaaaaccgcaaaatcatgttttcccgccaaaatcgcaaaatcttattttaccgcagaaaccgtaaaatcgtgtattctcggcgaaaccggaaaatcatgtttcctgccaaaatcgcaaaattatgtttttcccgctaaaaccgcaaaatcatattttcccgccaaaaccataacatcatgttttcgcaaatccgtaaaatcatgttttcccgccaaaaccgaaaactcatgttttcccgccaaaaccgcaaaatcttaatttaccgccaaacccgtaaaatcgtgtattctttgcgaaaccacaaaatcatattttcccgctaaaaccgtaaaactgtattttcccgccaatatgtttggtattgataatgtgtaatgatgttgaatatttgtcatttgtcaaaatgaaagcatgaagattttggtcatttttatctaaataagaatgtggatgaattacaaaattatcaaacaaataaatatctatttaaatgcatcatttaaattaaattacaaataataaaacaaacatcattcaaatgtatcattcaaatgaatcatgtaagtggatcatccgaatggaaatgataaatgatgaaacaaacagggtaatttaaatgaaactcatccaaatgattcaggagaagaagattaatttaataggcatgtgttttgttattagtcaggatgtcatgttttgttttatgttttatgatgatttttacgtattgtattaatgattaatggttttaaacttttatactgatctaaaaaatttttatcttatgtttacaaaatcttaggtttttcgtatatgctagctgagatcacgaggaatccaatttctaagttacgaggatagaattgagttgtggaatttggaaaacgagcaatttgaagatttgataatttagctagcattgagttactacaatcagtattttcaacgaggaccatttccaacaggtggcggtttgggatggcaaaacatttggcgtcgtctacaagaagatgatgctgcttgtctatagttattacgaatgtctcttagttgttttagaacattaagtgaaacattacaactgaattatggttcacaaccaacatcgaagagagggtgacaatgtttctatggatttgtggtcacaatgaagtttaaagagatattagattgcgatttggacaaaatcaatagacagtaaaaaggaaattttttgaggtcctaacagctacatagttacttgcttgtaattatataaagactccaagaaggcaagaactacgccgaattcctgaacgattgtaactagaccaaagatattggtcatattttagtggatttgttggagcaatggatggagttcatgtttgtgttaaggtgaaacgtgaattacaaagaatgtattgggatcgacatgggagaacattattcaatgttatggcaatatgtggtttgaacatgtatggattggagcaccaagattttgtcacgatacaacagacaactattatgtagttgattcacaatggagcaagacaatgattctgaattttctttgcctccaacagacaactattatgtagttgattccggctatccacaaaacaaaattttcctgctccgtataaattttcacgaaataggaatattcagtatcatacgtcacaatttgaaaatggtcctcctcctagaaataggcatgaattgtttaatcgatttcatgcatctttacgttctgtgattgagagaacatttggaatttggaagaaaaaatggaggattctttgtgaattttcaggatataatactcatggagaaatgatctcataactgcctttttgtcaacagtaaacctcttatatcctgttttaatctccatatcccctactgaataagtgatatgtgtgttgacgattttaccctatcttcctctttcttattatttgcgcttttttttgtgctatcattatttcatttattacatcgcttttaactgttacaatatttaattatttaatagtgactagtttttgttataaataactattatatatagcatatttagtttgttacatataattaaacaatagtatttagttaattgcaatattaataaattaaagcatttttaattatgcaatatttctctatttaattccagttcataaattatttttaatcaaataaatatttattcaaatattatatcataaatttaaaattcaaaaggaaatttatattagataaaatcaaagatccgaaattacatttaaatgtcaaagtcaaacatgattttatcagtacttaacaaaaaaaaacacataatatttacacgaacatgactttatcagtaggtcaagccacaatgctacctactgtatcagctatggtttgaatttcaggtttggtctccacccagcaacatctccaatctttgaaacatctacccatatcttgctcgcatttggacctaggggtatatgatggactgtgtctgaaggattagaggaacatactcttccttgtgctactctttctctcccgttcttgtaatctaacaagatgcatttcttcttggcagatttgctggtgctagcagtactgttacttaagctgtacaagaatcaaaaataataccaagcattcaggcgattgtcttttataggctgtaagttaaagtggagaaatttaccagtggaggtgatggttttttatctgctgatgctgtttcatacagtggaggagataaattcacatattgtatactatgaagtggccatgcaatgttctcatttagtacatctcccattacaaacattcttggacttggtctccataaatacgcggctttgttaaacatcttctcaaccttaacaattgcagcagaaagaccaagaggcatattgttcacaagttcttgtcggtatgttgaactcaattgaccctcacaaacaacagaatcaaccatattccaatcaattatgatgattttaacggtttatgaatctttagcctaaggcatgatgcataaatattaagtgagtaggtatagtgtttaggttcagctagataattgacaagtgatgggaaaaagacattaccgaagatcctggagtctgattctcaaaaaaagaagatacatcatcactgtctagaatgccagacaatcttgttccctaaagcttcaccaagtgtgaaaactgatggtgtaggcctcgacaaagaagttgtggcgtctgacactgacttaacaataacagcggcatcattacgtccaagtggaatacgaccaatcttgtactccctccgttccagcaaaattgatgtttaacttttgcacacaaattaagacacaaaacttttctcattatttaattaaaaacccaattcaaggtaacatgttttccttagacatgcaacgaaaatgagaattacggataacgtgttttacttgcacatgcaacgaaaatgagaattacacatgcatgcagcaagttctctctctctctgaaaatcgtaaccctttcatattcctccttcactttcttcttccgtttcattttttcactttccaaataaaacttgtttactcaaaataattgaaaattttaatttggagccacaattatgttaagtcaaatacaaaaaaaaatagattggagcctataaccttaactacattcaactaatcttctatataaatcaacgtgaatttatactatggagtcaaattcaacaatggcttttcatggctttaatctaaatataccacttcaaaataatgaacaagagtttttgtttgatttgaacaaaagtccaacaagagagacttctctagagaattgtttgggtgtttcactcaaccaataacaagaaggtttgggtgttccactcaaccaaaaataagaagatttttctttcataaattcaggtatttttatttataaatttatagtttattatactgtcttttatcatagtgattcactagtgaaactttcagattatttgttaaaagaactgcatatatatctaatttttttaaaaataaaatcatgtaatgacttatttatttatcatgagtttataaatttaatttgtacttaatgacttatttatttatcatgaggttataaatttataaagaattaaaaatgaatcatgttatttagcttgttcttagttaagtttgctttaatattttattgttttcaaaatatttgtaggaggaagtgttgagatatcacaaagtcttcatggtcgtaataaaagaatgacagatagagaaagacaagaggtttatcttgctcttttggaaagaagcaacaacggcaaattgaagaaaattcatacgacggaagttgctaatttattttccttgcttttacaaacggtacaaaattttggaggcgggctaaaaatactcctagtaatgaagttattgatgtatcacatcagagaaaaggtagatgtggtgggaaaaatattgaaattgatcttggtcggattgttgatattccactccatcgtcgtaagacgttacggtcattgacggcttctttggacatgagctgtactacattgtttcgatgtctaaaaaatgagctcattagatgacatccaaatgccatcaagccatgtttgagagaaggtaatatgagagctcgacttgaattttgtctctctatacttgataatagttctttgcccaataacccaaaatttgttgatatgtacaatgttgtgcatatcgatgaaaaatggttttatatgacaagaaaaaaagaaaaatattatttgcttccgattgaagaagagccgtatcgtacatgtcaaggtaaaaattacattgggaagggaatgtttttagcggccatgactcgtccaagatttgatggagaaggaaatgaaatattttctggaaaaataggagtgttcccatttgttactatgcaaccggctcaaagaagaagtggaaatcttgaggcgggtactttggagttaaagccgatgacatagagagaaaatataaaagaggttttaattggaaaacttataccgagaattcgtgaaatatggccacaagaggatattggaaaaccaatatttattcaacaagataatgtaagaactcacgttgacttgagagatgaggaatttcgagtagttgcttctcatcatggctttgacattcatttgatgtgtcaaccaccgaatttgcccgatttgaatattttagatcttggattttttagtgccattcaaacactacaacacaaggtgtgtccaaagacgatagaagaacttgtttccgcggtagaaaattcatgtgatgaatatcccacaaaacaagtgaaccggatttttttactttgcaatcatgcatgcaagaaaatctgaaagttcgaggctctaacaagtataaaatcccacatttgaagaaatctattttgaagaaagaaggtaatctaccttcacaaatggcttgtgatcctattttagtacaagatgtagtaaattacttaactatctaagtttttattattatcactgtatgtttgttttttattttgataatcaacattttgtaagattttttaatttttgaaaaactttttaaatttatattcgatggtttatatttgcaaaatacaaaattccaaatttaaaagaacaaacttggtgactttcttactaacaaaataaatttataaaagtttggttttctcacgttcacacattaacacagtttaaaaagatttcacacattcataacaaaatgaataaaactaggaaacataaaaaggaaaaagtaaattaagaaacaaaaagaatttttatagcttaaatttttttatatattttgtatttgtcgaattatattttgtttttcctttcaaatttataacaaaaataaagaaattaggaaacaaagcctagaaaataggaaaaagaagagacaaatttagaaactacgaattacatttttttcctttcaagttcataacaaaaatgaaagaaattaggaaacaaaaaataaagataatctaaacaaagcctagaaaataggaaacaaaagtaaaaattttagaaactaccaaaataataaaaattaggaaaatatatccttaacattgtcaatatagtatcttcagttttcttgtgaggatgtagctcccctacttctttataaaatcttttgttcaaatcaaattctcgggtgaatgtagagttgatgtcataaatctgataaacatctcttgattggtcttcttcatcgtcatatggcttgttcaaatcaaatttcggaacaatattcgttatgcttggaatcggttgaaccagttcgtcgtcttcttcttcgggttatctctccatggtgttagatttgttttgagtatgttgaacatcaatcaaatctccttcttctttcttcatttcgtttttagtttcttcttctttcattgaaaaagagaaaaaaaattcataagaagaagcaaaaaaaggaaataatgaaatagcttcttcactggttcgtaaaaagcaacgagagtaaatgacaactggtttgtagaaggcaatgagagtaaatgacaaacaattaatactgatatttaatgagtgtaaataaaagagtgaaccttttggacgtttaagcttcttaaccaaaatgacactccattttttattttattttaattattaattaaacagatatactaaataaacagtagaaaatcaaactttttggaacaaagaaaataactaaaacattaaatttgctggaataaagggattacatttgttcagcagagcagaattc

SEQ ID NO: 188 - DNA, 75812 bp, Arabidopsis thaliana
aagcttcaatctacaaaagtagaactactgatgacaggtctggcctacaactgacttgctttcagacttactggctgaagagcaaagagatatctattttacagtaaattcctcttagaatagcatcccgctctttataggtttagtaatgctaccttgagcccaacgagtgtaatacctggagcgagtaatagagaggacagaagatatagactttttctttcctttctggcttgaccatgaggccatgactattcaaatcttacaggaagcaaccgctgtaccccgccttctagctcttagacttttagaagggggttcctccggcgccttgttccgttagtttacttttcattttaagtcttgtaagttagttatgtctttcaagggatatcaccatcccccgcacctcttattggtggaagcgcggggcgttgcaaccatcatccttggacccggaatatagagttcttccctggtacctggaggatggagaagagaaggcattgtctttccttgatggaaaactctatggtatagctatcattaacggaggaaattatccttccgcaccttgatctttctagggctattttcactaagccgaatctgtggactgagtggctaactattctaggagtggggctcttctttgtatcgagaaaatcttttgttaacagttcaaactccctggcaccatcccctgaataaggggctgggggaggtttgacaccctcccagatcacttgagcacaaagctttaaaaggagcaatagtggtcctgctaacgaggtactatgcccggttggtggactttccttaccaaagtggcaacacagaggtttggtcagaaagctgataagggtatgacaaccttacggattaggcaatacctaatcttactggttcttcgtcagagccgggcgccgtccatcacgtggcgtttgtccacgggtcaaggagagtagaaccggcggggtctttcttagtgttttgtggtacataccaaaaggtttgtcattttataccgattgatatggctttcaatttgtttaccacattcaccgagaggctccgcttggtctcttggcgcagtgtttttgaagacactcggtcactccggcgtttcctcattcggatcgccttagtggctactgggctcgttagtaaagaatcagcgattgtttgtcacgtcttagcaggcaaagtacttagaatgtacaagacatcgcgggacccttgtttgcgtattattgtaagtctgcctttacttagtatttatttccgacccgactccatcgctaagtcgaatagaaagcaaagaccttggaaagaaaagatctttcacccggattccaggaaaatgagctgccattgtgaaccgctaccataccagaccagatttgacagacaagctccgttgcaagagtattccatctatccaaaatcccgcaaacgcttggagttggatccacaacaaaactcaaccgtggtcgtccagcacgataaattttgaacttacaccgaatcgcgaatcccgtgcaattgagattttctagttgaattcattcacaaaaccccgggaattttagatgaatcactccataacgaaaagtgctaaggtcctctcatttactatttgcgtaagttagttttttatataaaagagggcaaaactgtatgaaaaagttgctaaaactcgtcttttttcgttactttgaccgggatgtaaagatgtattttataaccttgtctgatgctgaccacatgcattaggcaactgttcagctattactcacgttagctgcatctcttccgagaccaggcccttttctcactcgtcgatggagaacctcaccctcaggctcaaaaatcgtcgttcttacgctttcgggggtctccctctctacagtgaggttctgtttgaagttatgattgagacaatgagtcacaggtctttcttttattcccttggaaatgaatcaccaagaaaaaggttattcattagcaacaaaaagagtaagacagccctgtcgggctcctgcagttagaagaagagcgcgaccggaaccaagcataaaagattgactgtgatgctacgtgcatacactgatcactacggagaagagaaaagatgtcataaagcatgggggggaccatcgacttcccccaaaaactattgattgggatcgatataacagagtgtgctcgataggaatcactattatgtccccgaatagaatgtatgtcacctttttctttccctttttgaccaacctgccgcgtatagtttagttgtttctttatgcgagggttgatgattctccagtttcggatgcctccggctgggaagaagccctaatcttcgagtcaggagataccttgagaacagtgaaagcggaatcctactttatttagtttaaaagaaggctttgtctcgtcccttcccattgtaattgtaggagggaaagtaaaaggagttattttaaaccaccctgcccctagccctaccatggaataaagatatagccctataacctggttttcagcagatctagaatctactgcccctctttcaacaaacttgcttgctatcccagcgcgtctatccttagttgtcgtgtctagcaagcgagaaaacgtaacgcgctaacgaacgcacttacgtagtaacccctacgcttgctgctggcgctaccttggatacgccaacccagcgagtaagggagtgagtctgtccaaagaagctcttaagaagcggagtttcactcgacaaaaaaggtttggactgaaaccattttcagacggaatcgactgacttctagttgcatcggatctagagatctgttgccagttccgatagaaggaaaggagtaaggtttaggctttacccaatagttgttgaactcgaggttggtaataaactgaagctgctcagtcttctagcatagcggagtgatatatatcgaagaatgaacttagccttcaaccacaaatggggtcctttaggcagccgattgcccgtttgcttccactgacttacgtcgtgaacatttctccaacccgtcaatgaaatgaagagaaaggcaacaggggaacaaggaaccagggaaagaccaacacaacttccttgacttcctaggcttagaaacccattcctataaacgggaaaagcttactaaccttacaactctggaagggattactttcttaccaactgacatggcttacctggcttaccttactaacaactaacaaaacattcctgggattacttcctgacagggcttagcttacttactaaccttccttacacggaattacagggaagccaacacccgggatgttccgagtgaaagtagaagtttaaccggaactgtcgaaagattactacagaagaacccataagatgtcccttacatataccgatgtaaacaaagatctgaacgattgagagaaggaagatagagagtatgataggggaaaggatagcagtagagctcttatataccaaattcaaacggttatcctcctaggctagtaaacctagtcggaatgaagagtacgggagaaggaagacagattaggagagtgttcagtggatacaaagagaccaacagttcttcggaagcagaaggaaagaaagcaggagaaacacaaactgaccgagctagcgatgttcctattaggcttggagaactactcggaggatgaaagaaagagacagggaacaaagcacagtatacatcctactagagctgctaaccggtattcctcggtggttccgtcctttaagccagattattaagtaagatatggtttgacccttttcctttttgttttcattttcatctggaaaacacccggaaccagagcatgaaataacctttcttttttgtatgactgagaggaacgcctcaggtcgaatgaatacgaaagggagatcaatcaaagaaacaaaaaaggccatgaatgaagaagttgggcctttcaccctctttctagttactctgggagctgatctgataaatgcacttcaaagggagggaaggctaggtctttcccatcttggtatggccgagcataaaagatttgaaaatcaagtcaaaataagaaaaggtagagagaaaactgaacgaaagcggtagcccccgtcagggcaagagaaataaaaaataaggactcttgttttccgcatacgcatataggctgtgaaaaataagtctactttttttaatagagaaagtgagtgattcgtctactttcttaataaggtaacggaacgaacttcaagtccttcgtaggacgccgccgtttgctaagatgtgcttccacatcgtgagtctttagtgcacaagtcgtcgaatcccttaaaggaaaggtttggggcaggagtatcgacgacaagtcgtgcctgaagttgttcatgcacatcttgaggagctcttgctaagtaaacttatggggacaggcaaaagtaaaagctcgccaccttgcagtgaattccatgacaggttcattatacctttgcttggtttttagtagttcgggcactccaacccttctttgtgtgttgctgaactgcttcctgaactccgagacccttgcttcccaagtcgggatcgactcttcagagaggtggaggtacaaaggaaaaaacactggaaggagaggtagtttactggctagagagaatcagaaagcagtttagtaaggtagtttacaggctttcttcctttcttcaatgcttgagggacttctttaccgtctaacctagctagatctgagctaccttaatccgtttgtaagtaatggagtaagagttacctggattgagacagtctgaagctttcagcccttaggtccaattccagctgctgttgctctctcaggacttcctaggtaaatcgagtatgtgaaaaaaaattgtcaataaattctcacacatagtcaaacaccttatacaataggttatcagactacatcgatagttgcttgaagccgatagtgggtaagtgttagatgaacgaaccctcttgtggatcgctttctcttgcacgttaattaatcgataaattgcgtatgtaaggtctgctggtctgtcaaggagaatcaagattcgacgggacgctagcgccctaacaataacaagagggagtgctaagctagggttcaaatccaatagtagctagaaccagtgaaagggtagttcaccagacccgctcacgataatgcgaatgaaagggcagataagcctattactagttacggcgagaagatcctaacaggccggtttacaacagaaaaagaaaagataaggcttgcagacctattagtcgaggaattggcgttcctcggggatgaaaaggaattgatctgacccaatctattgatccggacgggactacgaaagattgactttcttccttcagcttgaaagcgggaaagaaaggaatagacagaagaaagtattagagaggaataagcgagtgtcagagtagtcctaacctcagttgaccgatgatggttctgctggttcttacttgaatctcttgctttgagaataatacttcaaaaaaatgcttttatcttgcgatgtcaccactcgctttatatatagtataggactagaccaactttcgccaatcttcgaccgctggcgtatatgaagcacgttttctccgtccctacctcccctgcacccggccatggatcaagacttctttctggttctcctccggcacaggaaagtaggttcgtggctctccgtctcctttcttgatgaagtaaggattcatttattttgtgtctagtcgagtacttggaagaaccccttggaatgcttttctattttcattcagcgctacgccccttgtgccaacccttttctcgtctaataaagaaaggagtcccgggccctacctctactgaatggacttctacagctaacgatccctgctaacagccggccttaccttaagttggaacgaacctatctcaacccatccatcttcattcgatcgatatgggatccttattccttatataatatatcagaatcttatctgtttaaccagctgataggcaactacactcccttttgtatgcatgctggtaagactgatagactgtcattctatcccttttcttgaaagagcgtatatgatggttatgaatggaaaaatgcaatgattgatcccacagcgctttatttagcatgctatacagtagtaaggttatatgaaaacagaccatgatatagacaaggggctagatcgtgataagggcattatagaaaaaatccctaattcaggcagtggcccgtcatgactttatctcaaaggatgtaataggagctaatggaagaaggataatgtgatcaatctccagtcctttacaccctcctgactatgccccttgtggtcaactgagtcgtgcagcacatcttttcgtatcttgacttggtactatctccttttctaattcatcctgtaagcaggtttgagcgctttgaccatctataaaaagcgaatcttcctactcctacacctctcctgtgctgtggggcttggctgcgtagaatatctatcttgttcatgtccctgcccgggatttcttccttggctgtagcttcgctccttgggtctactccccgtttttctggaaggttctacctagatgccggaggaacccattcccttcgttgatgttgtagctttcgttgtttagagggcgcatgaatggggcagctaattaattgcatagtagtgctgctgttcctgcaagcacgaagtccgcgctgtagcttctgtcatttcattagtattcctcttctcctccgttgggaataggttgcattaagggaacaggtatgtaggctttagccggcttctccctgtgcttacatggggtttattgcagctatcccctcgcatttgtagctcttgagcagccaagctctaatcaataggttctaaagtcgacttcgtctcgttattctgtgttaggtttgtaaacctaaggtgtacttcccgaggaacgccagttagtcgactaaagggagaggaacgcctatctacggtttaagcagtctaatctcactctctcgtccagaacaacttctttgggtttacttttctgtacatggaggggcggagcggttctgttaggttgttttattggattgcactgggcattcactgcgagctcttccgaggaaccccttgaacaaacaaaaaaaagggtaattagttctgttttaacagaccccttgttccatagctgctccctatctcgctaagctacctaacaaacagtctcgctctatctcgctaacttactgacgacctacctaacttttctctctcaataactctctcgtctagggcatccgcgcctgagaatgctgtaagctccctctcctctctagacaagtgcttgagtcatgacttcgccctctccttttcagtcgagttgctaaagcacctctcgccaagacgtcttttccagtgtcgatcatcttgctttcccgaattcgttagattgccaccagttccagaattgggagaacataggattggtagttgggctctgctcgcttggttggtcattcccttctgtcttggttgatggataggtgagcgcatgcggttacttccgaacgaaccggtcgatggcaagctttagcttagctggctagcggaacagaagatgggttaatgggctcttaaggcttgggattttatccactcgataggaaacgatcttcaaagaagacacctctcccgcttctgtgactcagcttcatcgtacaagggacttttagctcatcattccacttcgactggtaggggttttctattagtgcacttcggtgggaataagtcttcctcttttctttcggaaggagaaaaagatgcttcatttggttccctcggatcggtaaatccgaattcgtgacccaaactctatctagtttagttacatcaaaggtggctgccgaataaaaggggaaactttgcctgccagattgccttcggtaaccctaacccagttatcaaaagaaggcgccggttcggctttcaagagaggggagcgagctacacatagtgaagcgagtattcgatgaacacgaaggctttgatgaaaggaaaattgacatttcaagtaggtaaagtagggcgcttaggctggctgaaaacagataaaggagacatcatgtgcttggacgagttcctccgaggaatgccttagacggatgaatcccgctggtaaatacggcgggataggatccactcttgcagctgaacttctttgtctatttctctataacctcgtatatctttttactgcgcccgagaaagaaaagagcaagggtaagggccccgggagaagccactgactgctacttcctctgctacaactggtggttatggatggagaaaaagaggggagctttcgatttttaggaacttcttctagttagtagcgatgaattagaatgagaggatccatccaaattggggagaaagagacgtatccgacgaaagcaagatctatgataatagattcagtatggattctcttgtaggtaagttttagcttgagcttgatcaggatccaatctgtactatatattttgaaacatttgtgagatgccaaagagagttcgaacaaggttttgaatcaacaggatctaatctactgctacccctcgaaatggaattggtaggaatggaatgccgtgaacccaggattaggcctcgttagctcgcttactcttagtatagcaggtaaccaaccttcttccctttatggtctagctttgatttcactcagaaaagaagaaaatgataggaccttgattctgtcaaaaagtgagtcattttcctcctcaaaaccctataccccgtaagccatctagcccctttttccattacgtaagcagttcgaagtcttcaatgtattacattccttcatccggggaggttttcatagcctaaacagaatggaaatcataggtctctccgtatgtacctttagcgctcagttcggaagtagatttctttcgttccttcagttgcagcaaggacttatttagctctttctttagtctctatggcttggtgagttgtccaaagccaaggggccctacacttaacaagggagccactctgccagagcttcactctaggcctctcacgtcggtagctatccgtagatcactattggacgatcttcatctttctccgaattatactcttctttctatcttgttgcggggaagttcagtcatatagaaggtctaatcacgagcagttccaatcccagcctgcctaggcatcgaagaaaacatatccatatcccatgttatcgcactcgaaaccatgctagctcatgttgttggtatatcaccttcaaccgcagggccggaggcgcctactaactctgtctcgtcccaggctttcaacagcaggcatgtaaccttcaaaagaagcaattgaggatggaagcaatcgacccggactaatggacctctcccagcaacagcctttgatgatcttcctccgcaaagccgttattccactgcaagtcaagattttccttttgatcgtaatcgggattcgaccaagtcaactgcctttcctgaagcagatgaaacggcagatatttgaaacaaaactaaggaaagtaacattccgagtacaaagtttgactaatttgctcagttgcactgtgaaaaggtaccggaaggaagaatgaaagctaaacagcttggagttcccattccgaacggagagagatagattcaacagaggctttcctaggaaaaagagaggggatatattgaaaagagagcagaaatcccattacaagctgtaaaacagagcttacaacagttgtatcgcagtggacagagtaagcaacattcataagaagaagaaaagggtttttttcctaacaagccagcttgtgtcggcagttagcaacaaatgcatgacaaatccattcgcttggcaggagagacaggatgcaacaggtattccgtagagaaggtataaatctatactattattcaaacaaaacaaagaagttctctcttgactcttggtacctgcctcagctgcacctactcgaaagcaaaggaaacaagaaaagcaaggcagctatggaccaatacttcatacatccttcccggacgagacaagaaagggatcttacagacaggaagcaccgcccggaacagcaacaactacaacgacgggtaactcgctggaaaaaagaagtcacaactagatcaagacctaaggagacttcgagcacacatcttccctatcacggctcatactaagaaagactctctagtaatgacagagcagctagccgctcaatcgtgccttacctcagtagatgcatacgcacaacccggaaggcactccttccctacaacttgtttacttaggaatcacagctacgccagcaatctatctcatcaagctacgtagaaccaggagaggagtgactcttaactgtgctctagcaacaagccagctagcccttatagtgcccgaagcaagatcggagtaggaagaccatgagcggaaaggcgttcctcgggactgacgtgactcttccacttgaccgatgaggtgaaggagtgagaactcttactataacagaagagaaaaaacaaacagttcccaaggaagaaacagtgaaacacagcaaacaacccgggaaggatctatacactaataggcctactggcgttcctcgaagtactccgggatatacaccagggcaactttgaaagacaagttagcaaccgtactactggtatgaattgagtattgcagactagtgctaagcccatagcaacaagactgctattatcagatagctaggacttattctacagctctttcacacaagggaacgtatggggatatctaaagagaaagtttatagttctgacttcctgccttaaaagcagattcaaagagacaagatccaattccttcagcctattcacagcggatgaagtaatagcattgtacaattagaacttcatacctttttcttgctttcttgttcttaagccagttacatactttattcgcccgaggggttcctccttttagtcgagtatgtaaacaacctgaaactaatgctttttccctttctagctttccaccattaagacttgttgacttcctacgctattcgattcgctggcatgtccggtctcatacgaaggaaaggctggatggtcagtcactcatgaattccttctcgaatcactactggaatatagcttatagaaagagcagcttgaagcaagtggcaatgctagaagggcatttctttcccgcctacttgagtagcgcgttggatctatgcttaggcagcttaatcgagacttcatatacgtagattgccatgtctgtatccgaacgaaaagaccttcctgatgttcttgccctatttaaaccccgggcaatttccaaaagaagagaaaacaaccacctcggaacaaatatcatgcatacataggaacccggcttcgctaacctttcttacttagtcgtgaaacaactgttcccatcgaacgtagagagatagtcaaatgacaaagaaaggaaagcagacctcggaacgcgctgcacagcacggaacagccattacatcagtgatcggcaaacaaagatagatacttaacagcagctacaagcaacaatagctacacccgcctagggaccactccagaagtaagctgcgattaaccagctcacttccctcattcgatagggaagacaacctgcagggatacatgcatgaacaggaatactgctacgcttacctacctgaccattcatgcaacaacttactcacataccaacaagggatatgaattctactgaagctgcaagcaacaggaactagtgccgcttagctacggtagttcgcaggccgttcttcactacctccatacatgcttcacacagaaacaactgctgtgcatacacagaaacaaggcagctatgcacactaactaaccattcctatcgatagaatacaagtaatggcagataggaaggatagtataaggtagggacagatagatagaataatacgtatataatcagaaggctgcttagaggagtgatctagctctctaacctctaactatcactaaactaaacaaagtggaattgaataagagaaagagattcgttggataagttgagaacaaagtggttcacaggtagctcagatggttagagcaaaggactgtaaatccttgtgttagtggttcgattccacaaccacttctatgcgttcctcggacgctaataacgaagcaaactacagaatctcaaatttatgaaaaatatggttcgactgttgttgcccctgctcggagctttggcaggtagtttttgcgcccgttttctaggatcagaaggaagcgctataatgaccactacgcgcgtttcattctcttcgatcttagtcgtaagcttcctattttgctttcattttcattcctttcgtttgaaagggccgcagaaaaagattatctatctctttttggtcttttccatggggttcgtgggatctttgatccggatcgaagtcatccacctagtggggggtctggctttgcccgtgttgggacctttggtcttgaatgcaataggggggcaagcacttccttctaccggcccttccgggtcgggcagttcttccatgtgggaggaagattcctttgaactgggagttctcgaggaatccgactcccccccggcaggggggtcccgaacggaagagggggaaccctcggtaaatcagggcagtcccctcccgtcccaaacagaagagggggaaccctcggtaaatcaagtgccccaggaagctgggcctgcgcttccagctaatccagtccctcccgggggggaggaagctgggccagtagtcccctatccatacaggagggatgaaatgattgggggggatagcgtagaggcgatagaacgccgccttctggcgaaataccccgaaggctctccctctgcggagatcatagagatggcccgaatagaggccgaagatctattcgagatcaaagcccaaatcatccaacggatggctctatatgacccaaccggcgattggatggcgcgtggggctcgggccctcgataatccgaggaccactagtggggaagagtccttggagcgtctttatgatatatggaaggacctccaagaaaccgggcccctctcggacgagttttctcgtttacaagagaaagtattcctcaagaaaggcggccctgggggggaccctatcgcataaggtctgcaagcctttcgggatgggcttttgcttctttctttatttttcgatatgccgcttcttcgccagcaaggagcgagaaaacaaagtgggctgtaatgatgtcagaatttgcaccaatttctatctatttagtgattagtctgctagtttctttgatcctactcggtgttccttttccatttgcttccaatagttctacctacccagaaaaattgtcggcctacgaatgtggtttcgatccttccggtgatgccagaagtcgtttcgatatacgattttatcttgtttcaattttatttttaatccctgatctggaagtaacctttttctttccttgggcagtacctcccaacaagattgatctgtttggattttggtccatgatggcctttttatttattttgacgattggatttctatatgaatggaaaaggggtgcttcggatcgggagtaaagtgatagggcacaaaatggggggaaaaagaaaggaaagagaataatgcccacgtttaatcaattgattcgtcatggtagagaagaaaaacggcgcacggaccgtactcgagctttggataaatgtccccagaaaacaggagtatgcccgcgtgtttcaacgagaacaccgaaaaaacctaattccgctccacgtaagatagccaaagtacggttgagcaatcgacatgatatatttgctcacatcccgggcgaaggtcataattcgcaggaacattctacggtgttaataagaggaggtagagtgaaagattcgccaggtgtaaaatcccattgtattcgaggagtaaaggatttgatgggaattccgggtcgaagaagaggcagatcaaaatatggtgcagaaaaacccaaatcgatatgaatggaagatgcctctggaactagtatcggtcagtcggtggaacaatcacaacgttacgccccaaaataaaactatatggagccgttacgaatgaccataatggagtctactacaccagccaagaaagagtgcatttgactcacttcgcccgtggaggtggcagaggaagcctaaggcatgcccgggctagtgtaactgatctcgctactcaatccatatcgtcagttatatggttgcttcatccaagagagggtaagaaggttcgaaatcatcaatgagagcaggctatcgcttcctccttaccctctcatcgactgctggtagttggctgacttggttgatggctttatgtcatatgtgtgccaagttaggaaggttagaccgactaattgaaaggctttttcgttgagaatagtttgaagttcccttctttgtagcattgtaagttatttccttctttagcttatgaattttttttagggaaaagaatgagaaaagtgacagtggaaggagggaaagctccttattttacccgttctaaaagaagctcgattaagcaggaagacctttggtctcctgttctctagcttagtcagttagtggtatccgtcggtcggttagcagatttgcagatagaaaaggctagccagcctaagccgatcccgaggaaaggggctataggattgcccacgacaagcattggatttattttttgatgatctccgactcctaagtcttccgcgtgccttattccaccctcaaaaaacgattttcgtagtttatcagcccgtcttgcctcacacttctacttcaggagcttgccttgagggtacgatgacgatcttagtccgaataactgcttcagggtgggaatgaatagaaggccggtgctaaacgcccaatgctatttatacgaaaagactgatcgaaccaatgaagtaaggctttttaacactactttcaaaggtagaggcaaaaagcccactttttagcgacatgatagcatgaactcttcccccgatgtaaacatttcctgcctaacagatttgtagacgtccaggaagcttaagatcttaacaagaaagatataaggcgatggcgtcgccaattgcatgaaagaaaggccttttaggggagttggctcgtgtgtggagtgaattcctctgtcctgtgtgcggaaggcatatgaagtagtccagtaaggattcaagtcaggttgtatttggattttgcaactcggaaattatcatagattgatgatcctttccttaccctactgcctatcaacattaaaaatatgcaaaatagcccttatataaatataaccaacccgatctacgagtggatattgccttttttttcatcggcgatctttcatagagttgccgaagccagaaaatctgctaatgcaatccgcagaattacatcagatcaaggtgtggatctatttcgaacaagtgatatccaagaagaagccattcgttacttctccaacctgtttcagttttcaccggtgaaccacactcgagcctctatctcatcccttcgctctcttatcgacttcatcagatgctccaactagatgcaagcgaatcttctgcaacaggttaactacggaggagattccaaattgtcttttcagcatgccgctcgacaaatcccctggctcggatggttttccagctgacttttacagattaacttgggatattgttggcccggactttgttgttcaaactaaaagaaagaacgctaataaaataaaggtccgatctgatgtttacgatttgttgtggttaatcttcccaattgactaagtgcaagttagaacatggtagcttctgattcacggccaatgagactccgcttgcgagctgaactctttttggcatcattcgcagtgagagaagagagcatacgcagtgaagaagggagtggagcttatatttcaaagtatattaaaggtattctaaaatcaagattatcccgacgtgagcagtcacgctggaatataatagatgatacaacttatatggctttctttgaagaatttgcgtctcttaatccagtttttcatactttcttattttacgggaggagagacggagaagatctttcttttcacattgttgggttttttcgtctatcgatacggggttacatattctttttatgggaaagcttttagctaccgaaaaggatccgagcaagctcatcttctagaatcaaatcacatcgaagaaaggtagcactggaagggcagagtactcaatttttttatctttgtgcaagtaatgatcgtgtcagcatcttttggttaactgattcagttaccgatcaatctggccctaggttccctagctccaacgcggaaggactctcatttcgtccagatctttgctttgcggcatctccaactgtaagctctgatggaccaacacttatgcatgcgatttcaagtcttcataaatgagaaagttcgagtcattacacaagcaaaggatagctataacgagaaaaaggtattttattttgctaatcccaaggggaatgtgaaatgtggaatgaatcaggaaatagccctttgatttatcaaaaatacagaagtagtagtcttcccgggtctcactgttcggataactttccttttaatcctactgcataggcaagatctcatccttcggcgaatcatgtggggctcagaagagtgctccctacgacggtaaatcggggcaaaagaccctttcttcgacgacgtggacacggggagggagcaggcgaagcgtgtcgttcgtaatggaaagaaagagaccactacttcgcctctttgttggaccgccggcgcgaacacagtggtctctgatcaggaccaggaaccaattcgaatttggatcttgacatgttggtggtttttaaccgtaggcatcttgccaggaagttggtgggcttatcatgaattaggtcggggtggctggtggtttcgggatcccgtagaaatgcttcttttatgcctcgggtattagccacagctcgtattcattctgtaattttaccccttcttcattcttggacctcgtttcttaatattgtgacttttccatgctgtgtctcaggaaccttttcaatacggtccggattgctagctcccgttcatagttttgctacagatgatacacgaggaatctttttatggtggttcttccttctaatgaccggcatatctatgattcttttctaccagatgaagcagcaggcatcggtccgtagaacgtataaaaaagagatggttgtggcgcgaagtactcttgtgcatctacgtcactcggctcgcgcgcaaccccgccccgttatgttatggaagaattgaacttcttgctgggctggttattcagagccagcaattggctgccggatttcgtcctgcaatgaggcagatcgcttcggggggtcactgtggcgtggctgaatgtagagcagtccgcccctacagcgtttgatcagtagattatttagaacttcggaagatggtcaaggtacgaagtgacaagccactgcgctagatgcgcatgtggtcgtagtagtcggctcgtcgctacttttatccaaagaataaggcctacaagctctctgtttggagacagaacaacgttataagttctgagtcgtatgaaaactagcggtttgggggaaatagcgatttatcaataacatagaataaacaagcttgcttggcagactggaagataaaggcaagcagcaacatagagtaccttgacctgctcgctggggacataaggattgacatgtgccgagacagctgtcccgcggattaaggaatccgcaaaggctaatgccataagacgagcaagactaaagaaagagaagatcggtcctcgtccactcggaaagctttttctcatcatagggggacggagacggttagtcagcattccactaccaacgagcagcaaactccttgcgactctaattgagaaaaacccaacaacggccaccctccctaggtgtaagataatagggcttgatgcctagcggcttccttttacgggttgtccgatctcacaggtttacaccttttaggaatgaatgttccacgagtcgttatgctttgattgtcgtctttcgaatgaaggatttgtctagctaataaacatcatccttcagtccgcgccggcattccagaacgaattcttatcgcttagcacaagcgctaaccctgacaaggccctacatcgcatatgcagttggagtggttagtcgattcatgcaaaatccaaagaaacctcactttcgacgaatattgaggtacatgaaaggaagacttgactatggtcttctgtataagaaaggagaacagtgtaagatagttggctattgtgacgccgactatgctggtgatcacgacacgcgtcgatcaacaactggaaacgtgttcaggcttggtttaggagcagtttgtctttgaaaagtaagcggtgttttagccgtaacccttgttggaagagaataccacgtaggagtgaaaactcccctgctcatctatcttcattccaaaggcgaacatttcaattgagtgactgtaactgctatctatagtttacagtcagtagttcttaaccaaccgcccagctttataaagctttaagagggaatagggagtaagggggaccttcgcttcattatcaaattgacctggaccctctttcttctcctgctgcagattttgccctgcgcggattctggagcttcttctttagtctaggatttcaaataataatcaaatcaaaagaagcggctgggcgagaacaagaagcggtcgtcgtacgccggccggtagctctactaagcgaagaaccgctcgctgccttttcttcgcgaataaccatgtggagtggaggtagcctaggagaagagaagcaagctacccttcgcctacctcccatctataagcggcaatggtaagagctggtaagcatggtaactgtatcggctaaggggtcggcgctccgcgttctatctaggttccgctctgacctttccccacctcacatagaagaaggggaagcccttcaatagaagaacccgtgtgagtgggaggattgaatcattcattcatcggatacgtcttttcccgtgatccatttcatgtcaactctaattagttatcaaaaggcctaccttacaaagggaaacggccgcatcggcccgcttcgtcaccgtcggttcccgcaaccaagcctttctcttattctttctttcagaagggcttgcggttcattacaccaaaggctttcagtgaactattgaagctatcgagagagtaccaaatgctgacggtgacgaaggttaccgactttcggtggacgcggagccaacgagttcagtcgaagagcgtaacgagtctaaggttacagaagcgttcgccaactttgataggtatagcattgcgagcaaatagagagcagagagcttaccctttctttctatgagagtcgcgagcttgttgtagtcggtcctaaagaaccttgctgcttacttgctatattcccgcgttcttgcacggctcgcgcgcaaccccgccctgcttctcccttccccctccccccccttaccgtccaaaactcagaggccgtatggagtatagccaagtggtaaggcaccggtttttggtaccggcatgcaaaggttcgaatccttttactccagattatgaacacccgatcggatctgtcaagaacgagctgacgacggaagctctcattaattagttgatgaggggaagcgactgacagcagtccctgagctaagccttggaaatcttaatgccataatgcctttaaaatcctcctagccattatcctactgcaataattcttgctaagaagaacgcccatgttgtggcaattccacccattaatagtaatggaactctgtgcaaagtttcctccagtaatatgagttaccaccccttgatcacttatactacccctcacactgatcgtacttccggcaaacataactagttcttcgagtaagattgggttgaagcggaaggatattcgctttattagctaaggctgattgaattgctaactgaacttaactagtctaattccattattctgaccctgcaggctttgatcttttttattctcatcgaaatcggaagatttgaaagcggaaagaagattctagccttccttccatattaaaagatcaaggaagacgagcaagaaaacggatgcgcgttagcgcaacggctttcgctaacgttgttcaatccgttgcttgttcccttgacctttcattcacactctgattgacgctacccggtccactcaaagcttgaaggatgaagaggccgacctctgtttttgaacaagttggtcaaggttcgttatcttaagcattcctgttggaacgactagctggaaaggcactaacgctttgccgagttatgatagggggatgaggagaacagacagagatggtcatacagacttctttatcagaccgactgctgatcgccttcaaacgactcttccagtcgctgacctacctcgaggagtgactctttatatggtgtttagctgagggaaagaaggtgttatggcctgcccgagaaggagattaaggctctttttatggcagtggagaagtggatgaggatgaagtgttctcactatggtgattcggtgaagagggcgttaagcctagtgaattcttgttgagatttggtagaccttgcgaatgtagctacttctgactatgttccccctcctaatccttctaccactactgagcataaaactctatctgtatgtgaggatgagtacactaaattccttcagtatcaagcagcaagtaatctgttcctactgcatcgccctacctttctagggccttgagttgggatacggttctagttccaaacccctctattcattcgtttgtagccgtgggtcacattcattcctgctgtttgtcggtagtcttctcggtttatcctatgtaataagaggtaaaagtagtaggagcgagaccgttgtagctagagcagtcaatccctttatcgataaagtggtaatgaagggtctgtagtaagcaaacctagtagctgctcttagtaagaccagtcacagggatatataaaaccagagaaaggctgacttctatttcaactgaaacaggcttggctggaagatcttttattaagtcagactggctagaagcgctatagactgaccgttagaagtcattgatagggatgttgaacactatcaattacttctctttagtaccggtataacatcgactactaaaagtagaagggaagaaaggttatccagccacttctttggtccgggataggaggcttgttgaatcagacgaaataggacatcggtgccggtactcgattcgaagcatggctggacgccgcactcctggcacctaaaggtgcttttttcgcgtactctttttttgtgatttcccggtagggagggatgtttttagtacagatcttttaagcgaaccactagaaggagtctttgattgaggatcatctgagatggatgagccatctcctttccattgccagtcaagcctgccattcaacaagccctgttgtggtcatcagactttattataaaataagtaacggaaaataatccattgctccgttgactctttcaagcaagggcttccttgtctcagaggccccttcaaccggcttcaaaactcgctattctgctgacgattttagcctttatatatcaccccgaatggagtactcaagttgaaccgggcggacctttggaagggtctgttcgagaacttcacaacttcactctagggccaacctcgaagggtttcctctctttatgaaatagaacagcagccaaccaccgaggttcctcactagatatataggactggtaccttcggtctcttgcgacactccgagcaatgttgccgctctgttcgcttctttttcaatgacggtaacagaccaaccttcaatggcagataattatcaatttgacttaggaggttccgatgcaaaggccacacctgtggttgattgcctccgccacctctctacagtcagtttaaaattccactctcacctgttggtgcttaaactttcagcagcccaaaaaacactcaaaagctccgcttcgaaagcagttgttgttggcataaaggctcttcgtcaagtcgaaccacaccgaggaggcacttgttaaccaccggatggagcaagttcgtgaacaataagaagctaatcgctggtgattctgttgtatttatgaggaaatcggctgatgagatgtttattggtgtaaggcgagcaccaatctctagtaacgtcggaggaacaagcttctacggcggagatgagtactgtagttattatcagagcaatggaggcgttgctaaggaagacgacggaagtgcgaagaaggggtttaggaggactgggaaagggaaattgacggctgaagctgtctctgaggcgattaatagagcagctcagggtttgccgtttgaggtggtttattatcctacggctggatggtcggactttgtggtgaaggcagaagatgttgaggcttccatggctatattctggactcctggtactagagtgaagatggccatggagactgaggactcttcgcggattacttggtttcaggggattgtcttctatacatatcaggaaactggtccatggcgtggatctccttggaaacagcttcaggtataagatccccttcactattcccttaatattcctctgatgttgagctgatgggaaaatatataaatctggttattcgaatgctaatttgggtttggaatgtgaggttccagttgtgtcaagtttggattgctgtgttggggggattcgtggtttgaaatcgaaatatgttgattggaagcagtattagttagttcattttcaaatgaatgccatatcccttagttttgttgtttgagattcatcttcaacaaagatacattggaaaaagaagtcggaagatcttggtcttagtattgtttgtgttgcactcagatacagtaaatcgctacaatctctcttctctcttctcctatccctccgcttgcttccgttttcaatctctcctttctctcagacattacggtctctttctctctctctctttctgagcggtgatcatgctctgtacattctagtatatgttgatgatcttagaatcacatggtccaatcctcttcatattgatgacatagtatgcatcaaaaatgccatcttttctataaagtatctggctcaatcttggtcaaaaagtgagtagaacttctgcttctatctttctcaaaacattactgatctattggtcaaggctggcatggaaataacctctcccttctcccatagtcacttctgggtcctctttgtctgctctgctgttgtaagttccactttgctgctaatcctcatctctatcgtagctagagcattcttggtggttgctagcataaccagacctgacatagcttactcagtgaactttcacaatttctgatgagaccttagatagaaaagaaggtttagattaaagtttctattccttcctattaaacgctttcaaaagattgttgagatatcttctctgaattgtctgcacttgacaccttcctctcaacttgctcttgttttagtgatgctgattggccttcgtgggaatttatagatcactctcaggatattggctttttcttgggagatcctacgggaaaagaaggaaagaagtcaaaataagagagtaagagcctaggttagaagtcagtttcagttctcttaggtctctttccacatatacaaactgagagttcagtctcatatagcatgaggggacatggcttggtaatcgattcaaattggacatagataatctttcaatttctcatattatatatgataatataggcgtggaaaatttattggggttataaaaaaaaaaagaatcctcgtctttacagtcttatcaattgtgataagaaagcgctcttagttcagttcggtagaacgtgggtctccaaaacccaatgtcgtaggttcaaatcctacagagcgtgattccgttgctcttgttaggtcgaaaattagactgaactcaaataattgaacagtaatctgaatttgatctctcgccagaattgatttaaccaatagacatatatattatctttcttacttctgaccagtggtgctctatacatattggtgaatttagatatgaaaatgaaatctcctttatttagaggaccactggtcaacagttccacagaaaatccaattcatatcctaacgcgagagaaattgagacatcagaccagtggtacaaactcaacagagaaagtaatactacctaatatacttcatagttatatcaaaaacctaaacttagatttcacatcaccatatggatcaactggtaataatgaagtattaagcatacttcgtagtaggtttaaacaaagcattttcccatcatctggattaaagtgtttggatactactggtgattttctcatcaaaaatgttttacataaaagatatgaaagtgttcagaagaatatctcaaatgcattatcatcctccataaattctcgcactgcagtcttcttttgtatactgttcagtataacagtgttaatggaaatagctcctggacctcttttgaagaaaccttcattattattttcagataatttaccaaatgtattgcaatatacacgagatgtgtatgtgaatcatgtttgtataatacacaaaagtttaagtccatgtgagtgcgaggagcctctcaatcgaattattagagatatgtttccgcaaaccacttttgacccacttgaactacagaaaccttcacccagtaaagtgaaaactataacctacatgcttggtactattcttcttgtaattacattaatggataagactggatacactcaattagttaaaatgtagatagaatgaaatacacattaacctccttctccatttactgttctttgattctaacctccttctccatttcccgttctgtcctagttctttgtttctaacattcttagcttaccgagataagcaattccctacctagaaaaagatgatcaaaggcattgaggatcaagctatccttcttttgctgttgaattgaattgaattatgttttggtaaggacatcagtattgatcctcgtctgatatagagactttcaggttttctagatcagctattatcctttgaaactcattaacgtcctcaaactaaggaaagaagtgctcagtgagctttaaatgattgaattggactttcggtcagaagtgagcctaagctttgttgtgagctgtctcgtttccctgtactcgcattcgcttacatcaaaccaatcaagctaggattcttgtgggattgactcctggtaaggaaccgtctttacatctctaacttgttggctcgttaggaagggaagttaaagcttgcctgtaaggggaaggcaagctctctaagcaagctgttttcatgcctatactagctttctttgtttgacaggttgggggaatacccaattcaaagagatcaagcttacactgcacagatttgaccttattaagaaagtttccgggaaggggtagaagatgctagatgtttccctagggtcttgactagttcctacttccttgcttccagtgtagaaggtgtagctggcatactggagtcaatatcttagttcagttgttgcctccggttgtcatactggaatgagtcaatatcttagtatcgtctgtaatgtggaagaagtagctagatgtcttccctgtggttctctgctagtggatacttctctctagcggtgtatcgggtgttggcacttcggttgttgccagtcctgtcatttcctagaatatgtgttagtataggctggaatatgtaagtattgtctagaagttccctgttggtcccttactagtctgctcttctttgttccagtgagttctgtcatgaagtgtagctcatgttaggattacccgggaagcgagcttgtcgacgacgacgggtaagccgtgtgagcggttaagggttgcttgttgctcagctgtctttagtcaatatcttatgaatgttccggtccagggaataatgtgaatgtagctagagtgttcctaaggtgcgtgcatactagggcttcttcctctagttaccgttgtagctgaaccagcacttgcagctgtatattctgggcgaggagcgtaagcgacatggcatatttgtgaaagaatctcccttctcttcgttcggactagccatgaataaccagttggttgcttccagtggaggaacccctgttcatgcatggcggggcccgggatcccttgctgctgcggtaaaagagtcttccttcttctgggcggaatgtgtatgagtaggcgtgaagtaggcgaagcagtcctcccgttgatacgtgggataggagaaggggtctaccactttatatcactaagttccccctctccgtcttgcaggtattgtttctgggttgtgtctgcttcccgctgtgcagcttccacttcctttctttgttctctgggaataagtagcatgaagagttcatctgttgtccgtaggtccctggctgagttatcatgtgtagctaagtacgatctgcgttctgctgtcagttaataatctcctcctctctttgttcggatgggaactattgtatctgttgttaacccttgtatctggctacgccgcccttagaagcagagtagccagtccagtaggtgtagttagttatctgttcaagtaggtaggaggaacccagcttctcctatctcataggaggaacccgtagaatcaatatcttttctttctttccacagaaggtcagcggtcatactcttcgtactgttgttagctgttcctgttccagacgaagtaaggtagccggctcagtctcttactcggagaggaacgcctactactcgactaataggagaggaacgcctttgacttctttctctttcgaaaaaaaggaatgtagttagcctaatcactgggatgatgattggatcagtttagctactctgttaaggtctacatcaggaggttcaactaagcccgcaggtatatttggcaggcacctgaagcgagttgactctagctaggaagttcttctctggcctgtcacctgagttagaggctaggctccgaagccttcagttctttagtctccctgagagttgttagagaaggcagcattggtcgagagagtgtgagcgaagcgtagtagcgctgctataccgagaaaagtaatcaaacctaaatctaggaaatacagctgggtgtgctcatgttggctaggtagcagggccagacaatccctttactttcactttcgtgtgtgcgtactattaagagttacgtgtgtgcgtactattaagagttaggagtataccagcacagagagaggagtgtgcttcaggtagagcacagaggaggataacagttaggagagttaggaaggagtaacccagcactgtgctagagaaagcagaggagtaccgagaaaaagcagcagtgtgctgtacagagaacagaggaaaaaaaagttcgcagcaaaagataaaacagagacggaaccttccccccttcatgctgtacaaaagcggccagcacaaggtcaaggcgaagacggagcagcactacctggagatgatcctggcgaagaacgaaccattaccattctaaggagggggaagcactactatatatctctttcttaagaagctatttctaagttccactttccattaaccgaagtctaatgatcgcctggcattagcgccatcctaccgtctcgtttatgagcttgcatcttgtacttctcctgcctctgaaggaccggaccaatgatagaccatgggaaacaggaaattgaccaatgatagttactcggaaactgggaataggttcggggtctagctatttaccatagtaagctatccttaagggcttcgatcggtccatatcaagaaagtcattccgcttacggctagcgagcactttcttttggtgaatatccggcgaatgaaataaccattgtaaaagctagagatgaatgcccagcactctcggactgatcatcttgctgcaagaaagcttcaggtcattgctggttcgtatgatccagcttccagtacaaaggcaatgtactaagaaagccaaacttggacaggggcccttacgtatctaagacatagttcgtggcatacgatcgaagaaagctgggcggaaagctcggacaccaacctcaaaaggcggtgttgaccctgttacagtacagggaagatccgtttagccaaaacgagaagatcttccatagtctagttagggggtggatttttttcattcctcaatgggtgctgcttttgactgctatctcgtatcgatctagtattgcggcttacgctagattgacacctttccttgaatacgaataaacgtgagagccaaccccataggtatgacccaggagggccaaaagtggcatttcttgcttcttaaaaagctgattgtgaagagggtctgccctttgaatctcctcgagccgggtctagtcagtctttttccctcgccctggcgaatcgtagctctgtctctgcctattatgctggtacctaagaaggaatggggcgaccgaccccatgttactaatcgaaaacgttcgtttcgagacccccatgtgtcctttgatgctgactgagctaccgaagcgatgttggttaggattgcaagacacgtcgttttagtcgggcaatatccgatgtcggaagaacaagaactgaataggctcgcagacctggtaccttaaagtcttcaccgtttgagaacacccgaatccgagtggcttagcaagagactctaagacagatcatccgcgccggaatcccctaacttcatttttggtattcccttttcgggttctagagtcgacaagcccataagacgataccgatgcccagagaccgaacacagacttatctttcccatatggctctataagacatccatggaatctttccacccccaacatctctattctttctattccgaatggcgcccagtatttttaagtatggttgtatacttttcctgcctggaactcctgaattaattctttttctataggaaggaactcaagcaatccggcatccccggcagctatgcaattacttaattcagtctacaataatttggtgtccgattttcggctagtggacagctataccaataatcctgtatacagctgtataatattttttataaaggattatcggtgagcaagaattaaaatgtagttttgagtttcgttagttaacctacctttttcttttggtggtgagtttccttttagggggttacgagcctttagcattcagattgggcaatgcgagatagattgatttacatttacctcgaggatagtctttcttttccaagcgcgctttcccaacctgccatatgtccgatacatagtcgagggctctatacgagcgcctttctttcaactctatctattcttgcttttcaaacattgtattccttatagaatatcatctcatgtctatctatagtataacgtttctcatagtggcatagcggctccgaggtgattctttctggtatccgtcctctctcatactgctttaaggttggaggatttagttcaagctagtctcctatggtgaagatctctatatttgttaagactgtatgaaagaaatcacatatagtaatcatctaagaatatatctatactataatggttgcatctaacatttctcatagtgtagataaggcagtccccggagctaagaaaactacgctattcaaagcaatccgcccaaggaaggctagctagtcgagtctaatgctaggctaggtgattcctctctatcaatgaccgaagcttaatccagagagagagctcactataccaccaggttgccacatttgcttatgaaacaagaacagcttatcccgaggctctgaaagactgagggtagtcactcaaaaagtaatccgtcacttcgcccgaaaagcactataggggattccggccaagcgagcataaaaatacaatacccaactttctgtttcagcccactccacttcattgaccgagactttctattccgaaccggttcggttaaagacctagccacgagaccaactccgggctgtctcgtaaaagatcaattcccagatgctcttactcgacgcccacaggcaagcttgtttagagaaggagagttctcttcatcagggaaactgctcaacctccactatttccataagcatgattatgcactagcagacataaagtgccaagaagagaaaacgcataactcataagccaaagatgtattcgatcctgaattgaacgtaattttttccgattggttggaaggtaaggatagcatgattgactggttgcgggtcccttggatcatgggccacagctatttggatagattcagatcctttcatgtagtagagtctttgatgggctcggatccttttcatgatttcatgtgaggacacctttggcgggcttttttgatagatccaggatttctgtgcgatatcgatcttctctttatggctttggttaatctatcgtctagctgtcttggtcttccgaaaaggcgaagacaaacgcatggatttactttattctatgactaaaccagaatcaccccggagtgagctgttccataaggggctcatattatccgacagagcagagctatcatgccgaagaagcctttttctttctacgccccggtggcatcttgactttcctaggtctctaatagttccccataaaagagtcaatgggctgagctgatcgagtcccattttctggctgcaaggcccggcccgagtagtcaatggttgctaccgctcactgcgcttctctgtaccatttcatttctagtcaaaatggatgctgggcatatctactgacccgacaagctgacgtaattctatccatccgtagctgtctgtgccgctacctctatccagcagatccagtgccaaccgatctatatctagctttggccggccgggccaacccacctatacagagttgatgccatgcccgcctaaccacgaaagaaagcatccaatatttcaagactttctccacagagctctaaaatcctttctccgaagatccaggctcactttttcaggcaatggaatgacccgagcaaaggaaagggatcaaggcaataactacgcgcatcaaggtgatacctagaccgagcgaatctgaccgtagcctatcatactgagtgaaagcgtgccgaaccaagggaacttgcctttaatcttaggctcgcagctactaggtgcgtacccttgaacctagcccgccctagggtacaggcattgaaagacggctttcagaataggcttttttgtacgaagagaaggttacactactatataagataagtaattcattataagataagtaattcattgtgctaaaagaaccactttgaggatcaatcccttactgaatgaatgtccttttgatcagtgatcacagaaggagaaggcactgtgaatgagaacctctttcctttctagctaccaaacgtgctaataaaagagcttattctgagtttgaattcctcgaattctgtaagctagcttggtctacctgctttgttctgatttcattgtattcctccgtattcagcattcgcgccggtgtcacaaaaagcaaaagcatatcaattcgttgaggcaactagtcttggtaaggttttttccactgaatgagaagtttgtatgatccagatgttttgaaggcgtgtttgcccctgtgatacgcgtacgaggagtcgacggggaagagccgtgctggggttggaagaggttccagctttagaggagcctccctatcttatcccttgttggtcttatttgacagctcagctttgtctcgggcagattttggtccatgatggactctttttatttattttgacgattggatttctatatgaatggaaaaggggtgcttcggatcgggagtaaagtgatagggcacaaaatggggggaaaaagaaaggaaagagaataatgcccacgtttaatcaattgattcgtcatggtagagaagaaaaacggcgcacggaccgtactgaagttttggtctttggtttgctggttacacgtattatccgttttgtacattctgttttgtttcccatcccagtcttttgcagcataaaagtccttttagattccttttgttcgcttcctattataaacaaactttccaaaaaatggcaactgatttggttttatgttatttcagttattctctgtaaatctttatttgctgtaggatacttgtggatggacgacttaagtcgtgccatttctcagttctacccggtggtatccggaggactaggaggaggaaatacgccaatgcccccgacaaatccatctgagggtggtcttttagaaggatattatgctcatgagaatgagcactctcacaatcagcagaggggttcacctttctggtcgaaagagtacaaggaaagtggctcaaaacgccttttcttgaacctcgaggtagaggatcaaaacacagataccatcggggagcaagtaaaagcagagagtgataaatgcgaaaaaatcaaggcaaaaataatagcaaaaacacatgaactcttagtatccgaaggttaccatattccggatgaacgggatatagaacgagcaataaatgttgtgatgactgaacatgaaatgatcgatatcgatcggcgtaagaaaagattctactatctttattcccggttaggaaaaaacggagacaagttttgggtggagctactggaattgctgtctgactacgacataaataaaagcgattccgacgactaaaccgccatttcaggtttacgtcttttgttaggtctcgacttcttcgctatgatcttcccggtagttcatataggagctatagccgtttcattccttttcgttgttatgatgttccatattcaaatagcggagattcacgaagaagtattgcgctatttaccagtgagtgggattattggactgatcttttggtggtgagtttccttttttctttttttcgctatgcgccgctccgccagcaaggagtgccacgcacaagcagagcgaaaacaaacaaagcaggggagggggaattattcgttgggggaaatcctttgattgcgtattatagatccatgtctttcttgttccactagctaggacaaaatttgcacatgtccgtttcgttattacaaccttcttttttgatgtcaaagaccagaagctacgcgcaaattctcattgggtcttggttgttcttaacagcgatggctattcatttaagtcttggggtagcaccactagatcttcaacaaggtggaaattctcgtattctctatgtacatgttcctgcggctcggatgagtattattgtttatatcgccacggctataaacactttcttgttcctattaacaaaacatcccctttatcttcgctcttccggaaccggtatagaaatgggtgctttttttacgttgtttaccttagttactggggggtttcggggaagaccaatgtgggggaccttttgggtgtgggatgctcgtttgacctctgtattcatctcgtttcttatttacctgggtgcactgcgttttcaaaagcttcctgtcgaaccggcttctatttcaattcgtgctggaccgatcgatataccaataataaagtcttcagtcaactggtggaatacatcgcatcaacctgggagcattagccgatctagtacatcaatacatgttcctatgcccattccaatcttgtctaactttgctaacttccccttctcaacccgtatcttgtttgttctggaaacacgtcttcctattccatcttttctcgaatctcctataacggaagaaattgaagctcgagaaggaataccaaaacctagttcactcgctctctttgcatccatggctgaatggttaaagcgcccaacctaataaagaggcaagtaggttcgattcctgctggatgcacttggaacgttcagttcaatcgcagctcacagaatctaaagagatagctcgcccttatagcttatggggcatttcactcgctcaacactcgttcaaaacatccactcgttcaacaggaaagaaaaggtccaaaggatctacttctcaggatggaaagaagcaagaaagtctagagagtcgaaatgaccttggtccaaccatagtaggactgattcggaagattctatcctattcttctaaaaaggagttctctaatttaactggacttgaaagcggtggatcaagcccccctttttctttggctgtgtccaagtgaagtgaaactcgggaatgaagcagataggtctcagtcgaagaaaggtagccctattgggtctgggattgcttacctttctttccttctacagtacgccttaggttattctaaacctccactctcagtctacttttgaatcgattgccttacctataccgaccctactcaacaggggccgtgaactatgaaaagcctgccaggcagagaaaaaagtgcaaaagcgattgaacaaagtcgctccggtttggatgcagatgagggagagggtgaaagctttcatttaaaggtaaagggaagggaggaggacaagtagatcttatcctgcgtgcagtaagtatgaagaagagagccaggtcactagctaggtaagggtctacgattgctctgcctaccataaataattttaattgagcctatactctttggaaattactgaaagagaggcctaggattgctcacagatctgcttaaaggaacttaagataagtgctggacatgctttgttgaggggctcaaccaatcaatagcttcgcttacttccccagagtcttttgcctacttattgaccactgactcctagatcagctaacgactcttttgaaagcatacagatccccaatgacaatatcgtcacccgtgggattgggggctatgagttgaactatgcctgcaatccgttgacatgggtactattcttcagggactatcccacatcgacgacaactactctcttttctgtaaaagattgctgcttaaaaagaagtctgactcttcttatatcaatcccccttccttctggaatacgacagctactactttgattgaaaaattagaacgactgctgatgtgtaagcgggaggcatactttgatgtatcaagcgctacgcactaacttctgcgtccttcttcagacagaatatccttgctcccatctattggaaaatccactcagagactcaatagttgataatagttgaatagctcctccggtagccggactgtcattcccacttttttctgaccttccggttctgaatccgtaggacacttctctgttctcatgtatacctacacgagatctcgaacttgaaacgaaacatcactctcctctttattttacctttctctctatccaggggccaaactcacactttcaggagctatagcatacatggagccagcagggagagccttcttgaatagcaaaagccttaagcttcagactagttctaaccccgatccttcttcggcggatctgtccttgcctctttcctgatacaaaaacttgcttttcattttatatagatggaaaagttagcaatcctattttccttcgtaagagcacatcttacatcgcaaactttctctttatataccgacgatttctatcaaaatggcatcaatctcacaatgtggtttgagcaattctatgaccagcaaagactagaattcccttgtcatgaggtagtcttaggttcatgaatttttcgggattaaacaatgctaacttccttgctactagctgcttcttaaagtgtgtttgacacccaccagatccaatgaaactcacaagcttatcttcgtcagtggagttaacttgatcaatccacaacctcaaaactatacccatcagctttaccaacaacaaccaatccgtaagtaattctagagactgcccttgtagctttatctagttctggttgaacgagaactttataattaagcctactaatcatacctccaaccccccaacacagggaaaattctggggttccaaagctggcaggctaggttcccgtttcttcctcttcttaaccttctttcccttcacagctctaatgcctcgccagagctctttgacgaactcacttttcagcacaagttcttccaggatcaaaggatgccaaaaatcagatcttattaacttcctcgtggctgatctcgttggtcccatcttctccgcttgtttcagctgcaagcggaaacgtgtttatgaggaagatccttgacaatctaagatccttaccgtcttcctgattccctgtaaacccaattcatgaagctctcccattagcttcagaactctatcacgactgtaaaccttccctacccagtcccactgagcttgttcaggcgataatccacccggctcccacacatggttagctcgtccaggatcgcaaggtcgttcactcgctacacgagcgctcttcagcgacatactatcgtaaccaagatcaagcagaaattcccatgtccgaggtctagaacacaagggcaaagtaggagatcggaaacgcataccatatctcgcagaaggtcgtgtagagccatcgctagatctaaccttggacgagtgagctctgtcacgcttccctggttttcttgcccgagccctgcggtagttgcgcttgccaagaaaccttttcggaccgcgagatcgtcttgcccgaggagtcgcaaaagctccagatgcaggaaatcccttctgagttggaccgctcaccacctgctcgatgaatttcccaagcgacggatctgggtcttcctcagcttcaggatcggcggatctcttcatcgtcgtcatgcgatggaaaaaaacatctgctccacccgagcgagaatccgcctgatcagcgctatatcgttactatccaaacccattgtcgaaatcgtcgttggatacccacagtcagaagaccgaaggctctgataccatctgataagacccgagatggatcttctcggtagaatagagaaagagatgaaaatatagaagaaattgggagaaagcttggctgattcgagacgccactcttccatctttacatagcagcccctcttttttccgtataaccagattccaggttctttccctatcgggcttgttgtaacacagttcttaactccggatcagcttcaacttgagatagtaattctgctgcatcgaaagagggaggaggtgcgaatacaagttccaacagacgctcaggttgcactcgtcttgacaacgcatcagcagccttatttttagttcccggcttatactcaatgagaaaatcgaagcctaacagtttggtagcccatcctctgttgttccttggtgacaaacctttgttccagcaagtgctttagactcttctggtctgtgcgtatcgtgaaacgttgccctgatgtctccaacgttggactgccaagactattgctaagagctctcgttcgtacactgatttcaagctccccttttcagaaaacccttggctgagatacgcaacaggcctgttcccttgtaataaaacagctccaattccatttcccgacgcgggtcacaaaaggtagcttcaaatctggcaaggctagaacaggaagcgtcgtcactgctcctttgagagccttgaaagctagtgctgccatttctgtccattttaaactgttctttttgagtaactcggtcaacggtctcacaattttcccataattcttaacgaatctcctgtagtaccccgtcaagcccaagaagcctcgcaattctgttgtgttctttggttctggccaacccaccattgcttctaacttagctggatcagctgacaccccttcgcccgatataatatgtctatgtcccaaatatgcaatctgtggttgtccaaaagcacacttctttctgtttgcataaaactggtgttgttcccaaatctggagcaccattcccaagtgattcatgtgttcctccgtgcccttgctatagactagtatgtcatcaaaaaataccaacacaaacttccctacggaaaatatcgttcatcacggattggaatgttgctggtgcgttggtaagcccaaatggcatgaccaggaactcatagtgcccttcgtgagttcgaaaggcagttttcttcacgtctgtggctcgtacacgtatttggtggtacccggatttgagatcgagtttggagaatacagaagctccttgtaactcatccaacagttcctcgatcacgggaattgggtacctgtctggtaccgtgagcttgtaaaaggctcggtaatccacgcgccgtaggccatcctccgtccttcttttggacgagcaaaactggacttgaatatggactgatgctcggctggatgatccgtgcttctaacatctccctaaccaatttttcaatctcgtccttctgagtatatgtataccggtaaggacggatgttaactggttctgctccttccttaaggttgatagcatgttccctgccacattttgggggtaatccttgcggcatctcaaacacgttttcatgccattccaacaactgtttcacttgagcatcctcaggaaaattttgagtcttaattcctcctgcaaaacagtgcggtgagctctaggagataataagccttccttccctctttgactaccgaattgagagagatttgagctcgcaccagtgacggatcgcctgctaaggtgacccactgatcttccctacggaaactcaaggtgtgtcttccccaattcattctggtgtcacccagagtagccaaccacgcataacccagcactatatccatggttacaggaagaagtccgcacgtatctgcacatcttggaccgttagctctactccgctgcatttcccggcacttggaacgacttgaccatttccaatagaaaccccaaatccacgagtttctgtgatttgcagaccacaccgatgtgctacactctctgctatgaaattgcttgtagcccctgaatcaattaaaacaatgacttcttgtcctgcaatttgtcctctcatcctcatggatctctcagttgttaaacctgccatcgaccgcaaagacaaccagagtaattcctttacttcatcctcatctgattcttctatctttttccctgtttcagcttcatcagcctcatccaactcatctccttcatccacagccatatactttaattctctgcccttacatctgtgaccaggattccacttgtcaccacaacgaaaacaaagccccttgctctttctatcctgatcaaacggtttccggtatggttccattttacgttctggggatcgggcgggcccggtgaagaagcattggatcccagagatggaatgggaaatggagatgttgaagaggcgggttgattagttctggttggagggctacgaactccttctcattgttccgctcctcttctcttctttaatggttgaccaggcactgaaggtcgatcatctgtgttcacctggtatggatataattgaagagtggaggtaaagggctcctgtcatccggcaatgcaagacccactccagatcgatgcctcttggtcagaccatttccgtatactgagattgacgacatagcgagaacaccgagatcattccgtaagagggtattgcagtggttattgaattgtcaacaatcctctcttcacatttgctagaaagaattttgagggcttctttggagagtgaatagctattctttttctcacatctcgatttccgccttctttggaaagataagagactttgctgctctcctcccaccttcaactaaggtagtcgcttagctaactaaaaaagcatcctctaacgagcacaccactgtatattttttttatttagataccctcaaagcaaaggtgaggaatagggctagctaacaagtaaacgagagacgtaagtgaacgaagttggcatcttctagctaagcaagcaaataaacaacttctctttgttgcgaagtgagccaggtaagcaaggaagtaatagaaagactctcaagtgtagctctatctaaacgcttcagcaaacccttgcgagcccaagtcaacttcggaccaacgaacttcatgtcatagagactagaggaatggaaccaactcaaacgacacggccgattaccactagctgagccaccccggctatctgaactacacagaatggaatgaaagtccccccacctattagccaaggatcagatatcatagatgccaagctactcaactgctcccagagagcacgccgcaaagtagcattaggactagcatagactgccgttacccaggacagaaaagcattattccgataaacactaaaatgaacatactggcgatgaacaatcttcacctccaactcagctttccaaagaagccaaatccccccagaaaaccctctatctccaagcccctttactaggttgggcaagcttggatgcccttactcccacaacaagttgctggtcgggatcgtgaaactctcgctcgaaaagtaagctggtccttgtttggtcataaggataatcgttcttattaggttaggggcggccggtccgggggttacccgcgattggtaatggcataagcagaagagggatagggggacaaggttacgcgctgggtagcgcagcgcatctgtttcgggtacagaggcgacgagggcgaagcaggccacccaacccaacaggtcagaaaccggatgatgggaataacgaagcagaaatcttgaaatgagcacgaaatgtcaatatcaatatatgaattctttcattattcgttatttccgggtctttttgttgcattcacttacaacaagaaacaaccaccagcgtttggtgcagcacctgcattttggtgcattcttctttctttccttggtctttcgttctgtcatattcctaataacttatccaattacaacgtattaaccgctaatgcacctttcttttatcaaatctcaggaacatggtctaatcatgagggtagtattttattatggtgtcggatcccaaatttttatggattttttctttgttaccggggtcgaccccagagccataatgtcttaaaacaaggaggccatagggaaagtcttttttttttttttgtctcgaacttcgtgaagaactcaattttatctctccctcgttacgaacaagaaagtggtttgaaaaaccagttgtacactcccttcgttctacgaacccttgttgattctgaacttcgttcgcgaaggaaccggacttttgacggaccagcccttttttatgcgccgctttatcctgaaaggaaaattaaaaatcctctggacgcttggcgctcccgtggttcgcgagaaggaaaaaggactcatcctttgttgcatctggcacgagatgataaagagagagcttcgtctatcgatgaacagcgaattgacggagctcttggcattgctttgtttttctctcctttcctatcagcgagttccgatccttttgttcgaaatttctttgtttgtaccgaaccgcttgcagaatcaaatcctgttccacaagatcctatatcagctatacatcctccttgcatttatgccggggacgtcgccagtgcggagggctttggcttatgtagatcaaaaatgatgaatgggattgtggcactccactcgccgccaatgcggaaggatgccgccgaaaagaatggaacgctgcttcgctctgctggatgcgtcggatcccgtataacaagcgagctttttaccctaaaattcaaacatgtgggcgcaaaatgctatcctgctctattgttacgtagcaatagaagcccgctcatgctgcttcggcggcgctttttcgccttctcttcgttctgggcaggagcgagaagccactcgactaaaaggtactgacgtaactctcaactaaaaaaaggagaggaaccctaatgactcgactaaaaggagaggaaccctaatgactcgactaaaaggagaggaaccctaatgactcgactaaaaggagaggaaccctagtgactcgactgaaaaggagaggataggagcgctagtggacacggggagggaaagaagactggaaccgtgcatctttgcttagcatggttcgacaaaagaaagaggtggaaaatggaccgagaaaataatgctttgtgaacccaattgctttgacaaaaatatatgaagaatcagtgctattgaggaacattttatagaaagaaaagaaaaagaagcaatagtaaagagagaagaaagcaagacttagaaagaagacaataagtaagagaactacgatttacttgattcccaaaggggtacgtaggcagccaaggacgaatcctggtccagttctttgctagtaagtgaggaaaatatatcacactttttttgaaaaaagttcgtagttaatctacctcggacgtacccatggcgtgtggggttcgcgtggggaaccgagtaaccaaagtcacgatcagtctaaggttgaaatctggatggtctttttgccagacgcgctggttcgagtccagctcgtgacaaaaggctaccctttctcttaagagaatatcgatatcctcaaaaatgagaaatggaaagcagcttcacatcacaagtgaggaagccaccggtgatcagctcaatgatcgtatacgctcaatagaatatgtacgcgcgggcgaaagaattaatgctgcttctgcccgcccctgcttctaagcctttgtcaccctcgccgcctattcattggattaaaggagcggtctgtataacatgagagaggaaacactagacgggaggatcaatttatagcacatgacagtagcatgacggaaggaatgacaagactaagcgaaatgccacctgaaaggacgaaaagaagagactgaagcaaaagccgaaaagaaaagcgtgactggactgaaggaatggagggaagctcttattaacggccaaagctaaactccgcttagcccggacagggacaaccaaagcaggaacttagagactcctagtaatacatcatacctactaaatcagtctattggggctataggtgttcccccggggaaaataaccaatggagttgattacgttgtgagtaaccgaggaaaggcgtaacattccatagttaagggtcgttcattagccctactagtcaagcacgggaagctaactttctatcaacaaagctagcggggtttccgggccttgttttggtccaatgtgaaaagctacatccgaggaatcgtatgattcagatacctgacgaaataaagagagaaaagatcgggatagctgggatgacctatttcaagatcagatgatccaccagcttgtctgcttgtgaggttgaggatttgactgttatgatctcttggcccgtgcctccgtagtgtagtgtaagttcttagaccaagattcgaaaccttgtctttcccgcttcccttcgcaggaaattttttacagaaagtagcgacactgataccttagaactaacaagtaccaggcctagaccggggagtcggaactaataacagcttttataaactccaaatccaactcttccaactccaagttgaacgcaggaaactctacctacaaccctcaattccggaggttggcagctcatcaactacgagaaaaatgtgatcgcaatcaagcacataacattgaatctcgtgcaagacattctttagctaagtctatagcagctgattcaatagcggatgtggtcttgttgaaggctttttgacttctattgagagcaaagtccttacttaccagaccgggctacttgaataagcagaaagaaaaaatgtcacgaacccaactcctaggtcactaggaagaagaatggagggaaatagaagaggtcctgtaaagaagctttcattcgatgcttctgattcaactcccagacaaacaaggaagtatgcgcgaagatagggttagtccctgcggcaggcattatccgggaacgattatccaggaacttacagaaggttggcgtgacacgcctaaatccacaacgcttcaggcgaagagatatatctttccgctttagcggcttgaacccttcgatcaagagataccttaaataaaatcaactaagtagctgacctcttagacgttcgtgggtattcaaattcatacataatcttctccgacatgagatagagtgagagggcctggcctattccatagaacaaactcagcaaatcttgatccgtattccacctcagatggtagaaggggcaactcagccttgtctttttctttgggctaggaacccaggagaatgttcaaagcgataagagaacaggtcttttcagagaagctcttgccgctcttctgttagagctctttagtcccattcctaacaacaggggactagctacagggaacaagggaacaagggaacaagctacacaggcactagcaactgggaacaagggaaacaccaactcccaacttccctagcccaaccttctcaacttccctagcttgcctggcccaaccttcccttcctttcctcacatccctaaccaactgacctaatccaccttcccctaacccaccttcttctttactaaacagagaaccagacccaccttcctctccatgttcttctacttccctctcaaataccgctttcttcatctacagttcttccactacctcaaaaccactcctctcaccccatgcttaccagatcaaaggctggcataaacaaactaaatcccaagtatagtctcactattactaccactattaaaaaagaaccaaaatctgttatttttgcccttaaggatccaggatggtgtcaagcaatgcaggaagaacttgatgctctctctcggaacaagacttggatacttgttccacctccagttaatcagaatattcttggttgtaaatgggtcttcaaaaccaaattacattctgatggtactcttgatcgcctaaaggctcgcttggttgctaaagggtttcatcaagaagaaggtatttactttgttgagacctacagtccggttgtgaggacagccactattcgtactatcttgaatgttgcacaacagttagaggttggccaatcaatcaattggatgttcaaaatgcatttctccatgggtatcttcaagaaaaagtttatatgcatcaatctcctggttttacgaatcctattcatccatcccatgtgtgtctgttgaaaaaggctctctacggattgaaacaggcgcctcgtgcttggttcgacaagtttagcgattttcgattttcttctggagtttgggtttgtctgcagctcagctgatccttctctgttcacgtatcacaacaattctgatgtcatgtatctgcttctctacgtggatgatattcttctcacgggcagttccaacactctgctcaatatgttgatctttcagctcagctccaccttctcaatgaaagaccttggaccagtccactattttctgggaattcagatcaaaactcatccttcgggtctgtttctatcccaaaccaagtatgctgaacagattctgaacaatgcagggatgttagattgcaaacctatgtctactcctctgccccttaagctcaactcctctgtttccactgctaagtatccggatccttcagacttttgcagcattgtaggtgctctccaatacttaactctcactcgaccagacataagttatgccgtgaacattgtctgtcagcgaatgcatgagcctacactcgctgattttgatctcctgaagcgtgtccttcgctatgttaaaggcaccatctttcatgggctgtatattcacaaaaatagcaagctcaatgttcaggccttctgtgatagtgactgggcaggatgtacatccacgaggaggtctacaactggattctgtacgtttctcggatgcaatattatctcctggtccgcaaaacgccagcctacagtgtctcgttcttctacggaaacggaatatcgagcccttgcactaacggctgcggagctcacttggtcatctgcttcgagatctcgggatccctcagcaatgaacactaactgaaagcggccgagaatgagtacctatcccttacgggaatcgaacccgtgtcttcgacatgaaaagacgatgtcctaaccactggacgaaagggaccaaaaggccattcttcatatacctcagctccgagaatagaagtggttgtggattcgaaccactgacacaaggatttacagtcctttgctctaaccagctgagctgaaccacttttccaaaagtctcttcttttcttcatcgaagagcgccctaccttaccacttgactagtaagggaaaagccctttactaatctaattaatagggaaaacttcttcgtcaagctttagagcagctctttcaattgacgactaatctcccaacatgctcaagaaccgagagccgcccagggactggacggccatagggagcttacttatgaagataggccggtcaaacaaaaaaacgcgcaacgggctccccgctcctagtcactaagtagtgctcttctcatttcgcccgcccgtttcacttccgcgccggaggaaatgggattcgaacccatgatacaatcttcttgtatgtcgatttagcaaaccaatgccttaagccactcagccatccctccaagttgttgatcggaattttttgtgcggttggttgcccgaagggggctatctgacccgatcaacttcgtaagccgtagcgcgctagcgcgcgtactcttcctctatctatgagcgagacaggcgttcatcatccagaaagatgcactgacgtcgtcccattgaatgaagatctgggcgaagtccgttggaattagccttgataaaaggtagctttttatttgacccctttcccttttttttgagagcaagcgcctaaaggaaggaaaataagaaaaaaaaagaggacgaagcaaactcgacaaaacacatcttttttttctatacgaaatttgttcgaccgagaatctcttggtgcgcttcgatactgttagcattcgcagtctgataagtggtggatttatgagggccccccatagctttttagaaccttggttattttacctaaaacgaaaagaaatcaacctaagattctgggagcggcgtcagtgactgactccttttatgcaattcgaaattataaggatggtcacaagtcactcaactcacttctttctctttcctcacacgtacttctatagcttgcttgatgactactctgaaagactgattgattctgatggatgatccatacgcgcgtgtacagttctttttgaatggcgaaatggctctcctggagtgagaaggcagatcgatgaggcacaagagtgctagttggactgaggtgggtgaaagattcaattcattctccatcttcaccgttaagcttcttgactagactttttgatctttctctgtctgacgctcgtcatctcatatcatcagataaaacgactattaatttcaagtcagtcagaatttgcgggatcttgactgtgaggagcaagaaaagaaagaagaactcatcaggcaagaaggggacttttcactctttcggagatgtaatagaagatgcagacttcgggcattcaaatgacttcctgttctggaatgtcaagccattagtagtagatgtcggcatttcctaaagaaagctgtttgagtagcaggaggacccgcggagcgctaatgaataatcgaaggcggattaagagaagagagctgttagcgtagatgaaagttgcgggttagtgctccaatatcctcagtagatagaggtagaagaagagctataacagtatacatagtaggtagcgagatcaaatcaaacctagtgcgtcactatcatcttacgcaccgatcggtctatctgatcaggttcagtatccaatcctgtgtagggcgggggagctgctagttcgctaggaaaatagaaaaagaatatagaaaatctataatcagtcaattgcaattggagaagaaagttagatatacttctcgctaatccttcttcttttgatcagcctagcatctccctcgtgcttatttattctttaacttttacctactgcaagacacatgcccatcccaagagcgctatgagttcatagagtggagaattcttcatggttcatccttttttcatgcaaggctagtacagatggtgagaatgctctggaagaaggtgtcccagtccgtaggggcactttcaatcaacccggtgggcgctcagtgactcgactgaaacgagaaggtacttaattggtccaacggaattctgctttatcatgaaagttatcgaccgaggaattccatttcggtagcaggcttctaaatacgctgcttgcccgaaccaaggaccttcacattctaatcaaagggaagatgctaagggtaccgataacttctgattatggattctatccaaggatcgggttctatctatgattggtgcgacgaatgcgatgactcttggttaaggccttgccttccctcatcgatcaaaatggccagtcacaattgttgcgccctgtctccctgccctgagtacgtcctggaaagcgaattcttaagcttggcccctctctttatttgaaatgctttagtgagattcacatctcgggaatattcttcgatacgagctactgtacctttatcttataagaacccttctctacaaccttcactattttattagtttctagtaagtaagtctcctgatgctacccagaagctccctcctgattctcgttgttaggtattttacttaggaaagagcagcactaatgggatatttttattaatggtattctgctaccctctccttttagtcgagtaatcaatccctctcctcatcaacaagtggaagagtcacgtcagtgcctaaaggtcagttttaaactccgagactgcagctccagcagaatccttccttggttcagattccttccctgccttgggatgccttactttctttaagggaaaagacagtatgatggtggtttttttccctgacttctgttttagtcgatcgagtagtaacccactagttattcaagcagttttctttcccctatccctttagctttagtcggccgagcaggttctaaccttttcttttggtcgagtaccttcgttcctcttccgagtggtcgagtaactcaagttcctcctctactaattagttgagccattcaggccacccgatccctgtccctaccggaagcctactgtctgactcttagcctagctacttagattagactgagcgaaactctgcagctgcttagttaagttctgctactgactctctttcagttgaggtggaatcaaacccttctttggcttaggaaaaaaaacacctctacttgttagtcttgctttttttcaattcttttggtcgaggagtaagcctcaccccaaaccgacactctttaacttaattacttttcttccggcggggcattttctttccttgcgtggatatcttttactagtgaaagcggcatcccaactgtcgaatgattgctaatcctcatttccaaaaagcataactcctatccgttgcatcagcctccatctggttccttcatttcagtcttagtccagcttgtaactaactccaaaccctctttctttcgagcgatgggatttgtgacgaaagcaaggaagactcttagttgttgaatgcgagtcattacataggtggaattttataagcttctttaggcccggctagcccgtagagtcttaggggtttttccacttttcctgacgcaaggtcggggtctttacgaataggacaaatatacaccaaccctttgaaggatgaggttccagttcgccattcctattatttataggcttccagtctcctcagaagtccgctcttctatcttcgcagaattcacttgggtctcttactaaccttcgcatctagggcatgatgtctttatttaagatgtcaatcgtcttgttattttcaataaatttttccaggcctctctacgggattggaagaaggagaggagaaggagagagtgaaaggagataagtagatgttatcacagacggagatgccagtgagaatactgaacagacaacagctgaggatacacagcctaagctttttgaccataaaccatccaataataaagagaagatgtggaagggtgaaagatagtgtactaacgagaaaggtgaaaagctagggaaatttctgttcaagtttcagcttgatagctatatctttcctttcttaactgggttttttaacttcacatatagcccatcagcttgtgacttcgcacactctcagtttcgagattgggaatcgacagaactgccctttcttaacttaattataaagggtagcttagctggttagatttactgaaggtaattcaatcgctgaacgttgataatagctttcgagaagagatccttactctccagctagttaaaacttccccgattagtaatgctctcaccctggggacatatctcacctttgtcagcaaaacagtagaaccatcttcatttctcagtctcacacttcctattccctttactgttgacatggtgtcatttgccatctttacttgtttcactaccagcatctgataaacttacaaaccattctcttcttccgaaagaacaacctgtgtcaagtatccagacttccctttgttaggaatccctaattgaaagtgagaagggacctacactagtatataaaggacatgggcctctccactcattgccaattggtttttagttggaagcccatgaacactcacatggtatcaagagccatggagggttctcttaagtcttatccttttccttccaatatcaatattactagttgtgtctccattaaactcaacgatcggaactatcttttatacgacgaaggaagggtgcgattgagtctgctgaacttgggcgagagatgtgacttcgttcctttcctttcagtcgagttatttaaacctctccagagctctggtgtctacgagaagcttcatgagtcaaacaattgaggaagccgatacttatactttggtagagaatctcgcataaagcaatgggagtcatggctcggattatgatcggactacaaggaaaaacaatgatgaatctcatcatgccatccaagagctgaatgcaaaaatggataagatattgaagcgtgaccaaaagaaaagatgacggtaaactcttgtgaagagtatggtggatatcaagggtaccaagactttggtgttgaagggtatgaggagccacaagaagagttgaactatgttggaggtcaaggattccaaccaaggcctttcaacgaagggttccaagctagaggggctactgctccaacaaagaccaccttaccaagcgccctaccaagcaccttaccaagccccttaccaagctcaagggagttctttttctgctccaactgcaccagatagtgaggtgaagctaatgttgcaacaattccttgaaggacaaaagaaaagtaccattgagatgaacacaaagatggacaacatgtacaatgatcttaatgggaagttttaaactttggcctctcatgtcaaatctcttgacaaccaagttgcttaaaccgcctcttcatcaaagagacccatgggaacactacccggtaaaccggaagcaaacccaagggaacattttacataatgcttagaagtggaaaagagcttgaggaagttgtgagagatgataaggaagaggagcaagttgttgtgagaaaggctaaacagatcgtcaactttcccttgcttggcatgctctcatcagcaaggtatggcttaaggcgctggccattcaccgtgaagtgttcaccattgacatcccaaagcactaccgctccatacggtttcacttcctttatgcgaaagggtaaaaaacatctagatctcaactttcctggaaataacttgagtctagagttgaggagcagcacttggtcatttaccttgaactcccttggtaagatcttcttataatgccaagccttagtcctctccttgtagatctttgtgttctcgtaggcctcttgccttatttcgtcgaggtggttcaattggaccaaccgcctttccgaagcggtttttatgtcatagttcaacaattttgtagcccaaaaagctttgtgctcaatctcaaccggcaaatggcaagacttcccatagacaagattgaaaggtgtggttcttatgggtgtcttgtatgccgtcctatatgcccatagcgcatcgtcaagcttggtggaccaatcctttcttgttttcccaaccgtcttctcgctttgatttatcggttggagatttccacttggccacttgtttgaggatggtaaggagtggcaaccttatgcttcacaccatgttttcttcaaaaggttctcaaaaactttgttgatgaagtgagatcccccatcactaataaccactcgtggtataccgaatcttgggaaaatcactttcttaaacatttttagcacaaccttggcgtcattagtggggctcgcaagagcttccacccatttttaaacataatctaccgccattaggatgtattggtttccatgagaagatggtttttttcatgaaatagatgccccacacatcaaatacttctacttccaagataaagtgttgtggcatctcattcctctttgtaaagttgcccttcctttggcaagcgtcgcaagaagaaacaaacccatgagcatccttgaacgtggttggccaatagaatcctgcttgtaaaacaaaccttggccactgttttaaatgttgcgaaatgtcctgcatactccgatgcatgcatggcaatggtagagaatgcccttcacttcctcttttgaaatgcatctcctaaaaagaccatcggagcatctcttatacaaaaatggctcatccaaaaaataatgttgcacatctcgcaagaatttcttcttcctatatccatggaacattggaggctcttgatcacaagccaagtaattaaaaaaatcggcataccatggaaggtcatcttccatgctttccaaaatcataaccgcgggatactcttccttcaaatattcgagcacataatagactttctcttcggggaggctatcatctatcggtatgtcctcctcgacccgaagtctagacaagtgattcgcgactccattctcaattcctttcttgtcctttataaccaaatcaaactcttggagaagtagaatccatctaagtagcctcggtttcgcgtccttctttgccaataagtatctcaaagccgcgtggtccgtgtgcactattactttggagcccaccaagtaagaccgacctaaacttctcaaaggcgaaaactatggcgaggagcgtaagcgcggtggtggcatagttgacttgcgcgtcgtccaaggttctactagcctcatcttttccccctccccggatccatcatcctcgaggaggaggaaatctaagtccaagactcttttagtaagactatggattgctaatctgcctacgcggaaaaggaagccttctccctctcaaactaaagagtaaagatagcccttccttgccctaaaatacatgtaacattggatttgctagtattcctacggggcttacccccagagccatcctaatccatcttgctaatgttcctaatccatctttgctaatgttccggtcttcaaacaagaaagagctagggggctcgttcgacctgacgctggttagacgtgaggtcgaacatgtcccgcttcgccctatggcactaagtagatggcgctcaacttcctgtccttcctttgccccaaaacggctccaaccgcgtagtcacttgcatcgcacatgacctcaaatggtaaattccagttggactatgggcgcggtcactagagcctctttaagcatcaagaatgcctcaaggcatttctcatcaaacacaaaagccacatctttgcataagagttgtgtgagtggcctagcaatcttcgataaatccttgagaaatcttctataaaaccctaatgtcctaagaagcttcgaataccctttaccaagtttggtggttgcaaacttgtcatcacctcaatcttcgcttggtcaacgaattttttacttgttttgaacagtattctaaagacacgtcttacgaaaagcagatttaattttttgaggaaattattaagtgggattctgaaacgtataattacagcttgcacttttaacgaggaactctcgcaattagctctactttctttctttctggttttggtgttccgatatctttcgtaggatgagttcgatccattaggttcttcaatttgttcagaaaagaaacaagaaagaagaaaacatctttgattacgattaaaaggaacaatctcaaatagaccaagatctaatttcgggtcatttcttggtgaacatgatctgccataatctcttcgattccttcatttatgtgccagaataaagatagatttggtaggaaagtggaagagactttattgtatatgataatcaaagggagtgggaaagctgcagtaattctttggaaaagcccggttctctttgtcttcgagctttcattttgtaatccactctttcgttccttcatatacctccccaccaatagatagagacaaataggaataaccaaactacgtctacaaaatgccagtaccatgcagctgcttcaaagccaacgtgatgctccttcgtcagatgaccaagatattgccgaataccacatataatcaagaaaagagtacctataatcacatgaaaaccatgaaagcctgttgctaagaaaaaggtagaaccataaatactatccgaaatagtgaagggtgcttgataatattccattccttgaaagccagtaaatactagagccaataaaacggtagctactaaagcataaactgctcgtttttctttccccgcgagtatagcatgatgagcccaagttacggcagctccggatgaagggagaataggggtattaagaaaagggatttcccaaggatctaaaacctcaatcccttttgggggccaaatacctccgatctctaccgcaggtgccaaagaagaatgagaagaagcccaaaaaaaagcaaaaaagaacataacctccgatacgatgaacagaatagaaccatatcgaggtcctaattgtacgactttggtatgatgtccttccaacgtggattcacgtagaacatcgcgccaccatacgaacatggtatataggataaatatgaggcccaaacttagaagtcttgcacccccttgaaatgggtgcatgtacatcacacctcctacggtggttgccaaagctccgagtgaacccgaaataggccatggacttggatctaccaaatgataagaatgcctctgagattcaatcataaaccactttgtctcggttatatgtaaacccccacccttcacccccaccgggctctttatctttggggtctaattttctttctatctgacaggacaaactaataggaagggatggttctttaattgcattgatagaagttctaactagaaaaggatctctctattactttgagaagagaatcgttggtttgaccgacggaaagcatgggagaaagaaagatgcacaaacagacttaaatctatgaaaagaaagaagagaacgaacgaacggatttagttctggggaggttggtcctcgtgtgcatggatgagcacacggagacaccaattaaggaacgcacggcgtgcgctttcctcctctatccctgctaattccgtattaaaccttcccctccactcggcgatttgccgatcccgaatggaatcagctcttcgaccgagatggatttgtcgttggagggctcgtatttcctgatccaggcgcgcggttaattcccgacgccggcctggatccccctcgttctggagggcccgttccgtcccctcgacccgttcccaagactccgacaataggcgattccgtgctcgtaaagagtcggaactctctatttcgttgtacaacgacgatacggagggattgagagcaatctcgttaccctccgtatcggcaggcaggtctacctgtggaacgacaaataaagtgggggtttccagaaacccaagaagacataacgagagtctcaataataagataactcgccctaacttcggggctatgaaaacaagaaagtaatataccacacccaaacaacttttagtgccatatcttccaaaacccagttttgtaccatccggtttgcaacccctactacatctgcctttacgatatttactatatttcgtacgtttcggatatagcacgtctcccttttttttgactatatgaaatccacactttgacacctgagattccgtaacgagtagatacttccgcaggagcataatcgattttatggttaaatacattacgagaagtttttctatgcttatagcatttatactttcgtggtcgccctcactgaaccgacttgaatctgaactacgattttgttccccaacttgcttgattaacgggcattttcggggactagcccgcttcttcattaaaaaagagggcgattgcccggtccttggaatcattttagatcgtatccccaagcctgcctccactttcttatgtgaaagaggtgcttgctttatgagactgaatggaaaccttctttcttcgatcagaatacgaataagatcaaaaaggccatcattggggcaaacaatgcaatagcttcggttagtaaaggaattccatccactccggcttagctttcaaccggtctttttaggttacgaacgcctagtcgacataatgtctggcgtttacctgatggttccccaagcccctgagctcatcaatgaacggattccacctttcacagcgagctgttccgaagttgcgcctgagcacagtgaaatgcctcttacggtcatctatagcgtgctcccagtcgtcatgtagagccaactggagagcacgcttgacatcctctggatcctctagagttatccctcgttgatgcaggagaatttgggctttccgtaccatggccgcctccaaattctcgcaggcgctcgtgatagtctctacctcggcagagatgcggtcgtgctcttgtgcccgagcctccctttcccaagcctgctcctcaggaatcggttgattgaccgacgaggaggtacgcccggaactggccgaatcttcgaccatatcggatgtatacgtgaaccattctgaggaggaagatgccccgccaggtcctacgccataccatagaaggggttctaacaggagcaaagcctgaccacccagtagatagacgactttgatccggatcaaagatagcacgaaccccactaagaagagatagagaatcctcttcagcggtcctttcttacgaaatccaaatataaataccactagcgcacagaatgaaacgcacgtagtgatcattatagcgcttccttctgatcctagaaaacgtccgaaaaaacctgctacggaaccaccgaggagaggcaaaaatagtcgaagcatatcaatattaatcattttatattttttcattttctttaagctgttgcactaaggttacttaagaagattcccagaatattgactcatttactctcaggtgcacttaaataatttacggcgagctcttccgaggaatgcttacaatagaagtggttgtggattcgaaccactgacagacggattttcagtccttcactcgaccagagctattacctgtcaccactttcttttcaactcgtaaaggtaaagaaaggatccgcctcaactaactgatctatcaacttgatttcttctcttatgagattcttttttagtgatagttagaggtccgaaaaacgagagggaagaactcgactatttctctgatttccagcaacagctctttctatctttctggctgttctacctacccatctctttcctggttactcgatagatcttcccctgggatggatcctgggctacttaagatcggatcaacttcccatttgcttactagcacaccccggcatcctcccaactgcgcgcacctgtttccggccctgccaagagagatcttcttcctttgtgctgcactgaacactctccgaatcatcttggcactcatcaaactatgctttttttccttgcactaaacactttgttaatcgtctgagcagcaaacgtacaactatctctttgtccgtctgtgaacaagtagtatgagccagttaagtgagcgaagcaaccctgagctcctcagcacactcctgctttctcctcaacatcaacattcaaatgttgtaacacttgactatattttaaaaccagaaacacaatcgattcaaaacgattaatcaatcaatgaaaaaagacgagaagggttgatcaattgtcgggtttgggactcattgattctccgcttcatacgaggggaatcacacttcaaatcaatcaaatcaaccaatcctatcaatacatgatatgttgaaattgtaatcatcgacgattatttcttggttgatccttgtcgaggggaggattgatccaagccgtactcaactcaacaatcgctattatctaccttacaccttcgatcgtcaactcaaatccatcgcttttatatacattactatcgatcgacgaaaaccaacatcacacttttcatgtttcatatcgacttggtggtagatccctggcaagaagcagcagaggaaaggaaagaggaaagcttcaatcaaatttctcgtcagttgataatcgacttgttggtagaaggtgggagatatccctgctaattcggaatgaaaagaaagaaccaatcttcgtaattcgagatgatatcaattggagattcatctatctcccacaataaacttctacttttaggttgctcatcgaaatgtctatagtcgaaaacccacgtttcgaggggtatgaaggtgataggacctctgaaatataagggtaggaagattgaacaccacttatcagggccaactcaactcatattggtgtggcatgtgttggcatgttgacatattgggcaggagcccttacctctatcaagtcaaagtataaatccctgcgaaaagaaaaggaaaagcaaaagatcaagaaaagtcaaagttgctgcgctaggaattgggaaattaaggatgacagaaatgggagatcaatcacctgttgtatctatcccatccaagaaagctgggcatccgacccaataaagtatcagatttagggtaggtccttgtaaaaacctttcaagttgcttactggcaatcgcacgtttcataacttttcaggtgctgatacccctaaaactgaagagccaataaaaacgaagggtacctttcaagggataggtcccgggattagcagctttgtgctagctcctactattggcagatgcgtgacagcacgcacgtgtaagataaagtcaagaacttcctttgatgcgctagggatgcgtaagggcaagcatcagaaaaaaagaattctgatttctcatattacccggggtccatccctgcgaaaagagaggaaaagcataagatcaagaaaagggaaaagagaaatcctctgattaccaaaagaagaagaaccggtttcagaagaggtccaaaggaactcaacttaaattgctgctttaaaaagaggaagacttagattactcagatgacaaggggatgtttacagttctgcttattgtcctgcattaccagctgatttaaactagataaacatatgtgatcaataaaagcaaaagatggaaatgattgattggataatcggtggcatactattcaaagatgtacgaatcacgcctttaatcaatagaggtgcacttgtcgaactttgatctaaaaggaagcaggagtggaaagccagcacactgctatggaagataagacggctcatagacgaaagaaagttaacagatcaggatctccaagcctatcgaagaccgtaggaggagtgtgctggaagactggttgggtctcgattctttccaaagcaggccgcttttctttagatttagaggtaccagcctcatcgacagggagctcaagtcgctctaaagctggccctttatctttagcatttgaatgattacccgctgcttcacgaggagtgtgctgaattgggttttcttcaaggatcctttcaagggctggacgacgtttagacgaagacaggtctttgcttgcgtctaaaggagatgttctaggtgtgtgctgacgactaaatgcagcactgtgctagaggagaagctacttaaaattgctgcgcttcatttgctgcgctaggagtgaagcctttccatcgcaagtgaactggagattcaacagaagccgaacctcagtagattggactcctatagttgtagcgaacaggtttagagcaatttctgttcaagtttcagcttgatagctagggattaatgcagcacattggtagaaagagctacatatgagatgaacctgtgtgctgcacaaaagggaagcagcttccaactttaacccttgaaactggtacatcagtgtgctcaactacgaagacagccaagccaaacaaaccagccagcctgctaagcaaagtcaaagctaaatctctttccggcaaggctatactcacttctagtgtacgagtgctgctgcttcttggcctcgctcttgctttgcaaagatgggtcgcagcctggcactctcagtcccagaactaacaatctcagaactaagaatcaaagaatcccagaactttgaattcaagaactagggagataagtggtgagttgggaaggaatgttaggagcctagacccttcccttacccagacccagaactaggaatcttataactaggaatgtgagtaaccctgaccctaagccagagaagttgggtaagtgaatgtgaattagaagaagtttgaatgaagggaatgtaagtgagtgaagcaagaacaatgctagccataggggttcctccagcttcgctgaagaagctaggttcctccgcaactaagccagtgaccaatgaaatgaggggagagtagctgatgaaatgaggggtgagtacgtagattgtaaaccaactcatgggctattaaaatattgtcagatataagcctttccgaaacaaatgcagactgtgtaggagacacaagggaaggcagaatcggtttgagtctggccaccatgatctttgatatgatcttatacatgactgagcaaagactaatgggtcgcatctatgtcattaaccgaggattgagcttcttggggattaagcaaatctgagtcaaattccaatccaccggaaaggatcctgttcgaaaaaaattcctctcctcctggtagtagctattaatgagtgatcggctgctaggacaagagggcaatagcaccgaggaacgcctctgatcttccttgcgtctgtctcttccgatttcttatccgctttgagctctgttagtagcttgacttcctctagtagctagtttagagttcctatcctagctgctagctcttctttcctcgtagctctcttcttgtagctaggcagttagttgttcctatccgactagtaggaagcgcggctatggaactaacagaatagatagagcggcaaccaatgctattaggagttcttttcggtttctatactagcagctagtagtcctatccctattagctttcttgttggcattcctttcgtagttagaatgccatatacttgaattccattcggtcttgctgagcttagaaaagcgctcctttctcacctatgtactctgttaccttaggaatatcaaagggttggaccattgtctggaatgcaggtatataattgtcgggagtgagcctagcttcccttcccgtgcctagctctcctggttccatccatcgtgagaaggaagtgcaatgattttgcagtctgccaggctgtcggaggctcctggcgcaaactgggaaaaggacgatgacaacccgatatttagaggtagagggaactttcggtgggcaatcaataaagaggatctgccagcactaataagtggaaagaagtctcagaaagggagaaggcacctccttctacaagcagtttgtattttgtggtgaaggagaaaaggatggtgaattcaggtcgctgatctcttctcatcctacactatggatagagctagggttggcaaagaacccatgtgccggctcgctttttatttagagattcaacctattgtgacaaatgaaagtaggaagacgtccgcgcttactctactagaactcctattctagctcttcgttctgactattacccgggaacggactggcacttctaaaaagctatttaggggaaaaagaaaaaaagaacccctccctccttcctcgcctactctttgccgttgggcctaatttcattcaattagaatatctgaggggacaaatcgaatgaataagggttgccgagccaagaattcgatccgtttttggaaatcagactgagctactcaggtgaatccagtgaaaaaagatctaatccgaaagagcttcaagcttagaaatgttctgttcagaaggggagaagggctaccttctttcagatgaaaagttgaccgaggggccagtactgtgccagtagggaccactggtaggctctttctgatggcaggacgacgtgggcgcacgcctgaaagcagcttgaaataaccttcctctttcctctctggattctctggagagggtcttcccctgcctctcagagtagggttccattctgcaagatcaaaatagaatagaaagaagtcgtcttctacgataaggtactttctgttttgagatctcgtagcggctcttatcgagaatgcgaattccaatcagactctaaagtggagtccgtgccccttccaaaggtctcagaggagtaccaaaaggtgccatagtcgtcgcaaaggttcaagcaaggaggaagtctcatttcaggggggggtttcagaattcccaagcgcctagtcagttgaagggtcagttccaggttagcgtccgattgtgcgctctgaataaatctagatgcggaaggagaaggtcaggggtagccgatgttagcaacctggctacacttctttttagtgaaaggtgagctacggtgccccaaacttctaggagtagagatctcgtctctgcaggttcggagctcctatctccgtaccgagcaaagcacaggtaataaatctctgggttcggtcttccggtggacggggtggatcgtaagctccttctcctgagtcgacctgagagggctcttccttgcctgttcttctagttgatggttccttctttccattccttgggaatggtgtccgtgctactgaatccctcattcatctgctgtggtctccccctgacctggtgagagtcagccaaccccagctagatggaatatccattattctgatgattctattctgcattctccgttcaaaaccgtctactcactaaagaaggaacagtagatagtagtgcttctagaagagccctcttgggtgaccggatgagagtccgagccttcgaacctcgggcttttttctcttctttcacttcactcaccttattcaactgtgtattttgggaggacctttgacttcctctaagactattggggcctattaataaaccgaggggacccccaggctctggatgacaaagcagctcggaccttccatcaacaggtcaggccaacaactcggggctgttgatttgatgggactcactgagagatgggagttatttttttttccagagtagacaggcttggaggggaggaagccctcgtcaggtacactttctgagcttggtgttacgtggatagtaggggggaagggctcgcatcagaggggctctcacctctgtgcagcaaatcgaggtctcgacgagcctctgccgattggacccggggacctaagctttgctaaagcaaaaggggttaactttttttgactagttggactggttcgcctaatcgatcagcccctaccttattcaccgtactagatttccatattgtgtaaagcgcccacctcggatacgaaagaaggacaggagtggttccactagccgatgcttatcagcccttcccagcctcatccgtacctgaataatagtcaatcagttgccgaatcggcatgaagccttctcaagttccatcctctctttcccacggataagcggttgccggaagcgactttaatgggcaagacttcctcgtcgggccaccttcaatctcaatctccatttgctaccttctactctttcaatagaaggtcatcagtcccccgagactaaactcaggtaagcttctttgaaggggggggggaagtgtgctgactctactttaaaggagagggacgagactcgactaagaatccgttagccttaagagaataggccctttttcattgagttcttttcccgattgccttggcttattactcagacgagtttgataaaaagtccagtgaataccctgtgattcagagagggaatccggtctttagacagcccttgcttcttggctgtggatagggctttgactctcttgctagaaagctaaccctttacctttatccggtactcggcggaagagtgctgtacagccggctctggactttccgctttgatagatagatctgacctccctcactctctcatcccttagagaaaaaaaaacagatatggaaccttctctcgctctgaaacttccataacactactagtaaaattcctcttattcatcttcgccaggctctgggattcctattctatctagaacagagaagaaggggcgtagctcttctatcggcttcttattagtcgtcgtctgactcttttagagaccagaaactctccgttcttgcatcagggcgcagtactaattgattctttcatcgtctttgattgctttcttgattgctaacccctagccaaccctttcctcagctgatgccgacatgcctcttttgggttattctctaatcacatctgggaagactcctctttccactcggatcaaaaagctgatcactgtgaaggcagatttatagccataaagatgatcaggccttagtgccccggggcaaaaagccacgctttgctcttgatggtcaactcgaaaaaggtttgaataacttatgttggaaggctttgtctacggtcttgttctcttaactaagattccattcgtcgaaacagaagtacggccagcccttttttatatatctcttttgtaagacgccctgcctgaatataataccttatcctggcccgacaagccagttggagtggtagttcactgttttccaagcgcatctagctcaattcttgttggaaggctacctcgggatatggcaatgaagcctatctgtggctatagtttcctgagtgaggggattggagagtacgacatatcctttgaggcaggttattatcagatattttctttcctaaaagagatgcctatctagttgatgtgattagtgcttcagtctattagactaggccctacctttatatgctatgggaacctagcttgttatgctacggtttttatggtggatactggtcctgttaggtcggtattgtacagttgatggggctgctacctaagtgctggacttttacggactggtaccaaccactgatgggtgaaattatgctattattgggtctgacctttagctggccgattgtccaggaaaaagtgattacttcaagtcttcgccaccgctatcgtaattaggtttcatgctggcattcgaggcaagctattggatctgacataaatggtcaatattagtctatttcatcgagctgactgaaacctatttctagaagttggatctgaatagttacgtgatgtctggttgaccgattgattacaaatattcgacacaaccgatgtacgtgaatgggtaactacttttcggttccttactatgatatacggatagttaactatatatagatataattaaggaacgtcatgcttgtcatgcttctctttctgtagtcctccaactaagccgagcgaggtgaagcgaacccagccaatcagtcaagtcggggcaagctaaggcagctacgctaatcaagtggagcataagtcacacgaatactgaaactcgaagtcaaagagaaagatcatttagaacgataagggtgaaagttaaattggttgaaacattcagaatatagaagccggtcgaaacaagttgaagagagccaggtcgagggaagggaaatgtgaatcgcccatttttgtttgatgggattattcttgagtggagtacgattgctctgctttatgctttgactcgagtgactgatggaatgtgatgagtctcctttttctcccatgctggtattgtttgattgtccttagttggattggtccttgcattgcttttcttccttgctcgggtgagtggacttctaagtaaaggaatccatttaccggtaatctttctgcttagcttggtagtacgaatgcggagcctgacttgctaatcccgatgtgattgttccttggtaggtttccttgaatctagtgcaattgttaggtgtcaaagtctacattgattattggtctacgccgcttggcttactttctcggttccttcttagtctaagtcgagtagtctataccacgggcatctttatgctgctgagcctagtttgggtgtgaatcttgagcctgacttgcatatatgctttgctggcgtaagtgccaaatgtgctgattggttggtcctgctatgctgagaagtcggctggaagagtgcaaattgtgttttatgtttcacttgccgggctgagctggatggggaatgttccttgcctcgggtcatagtttgttggctgctcgcctgttatggagctgggctattagtttgaagctgggctccttgcgattattttgctgggctcggaaaagtttttgttcccaaactgagttctacctgaggatctttcctggcctccttaaccgatagaatgggactagtcaaaggttggcaaactacttcgcattggccttttcttcttccgtgctttccttaacttcatgcttttctgcttagattgctgaaatccaataacaataattagaaggaatgttgaaatgaaatagaagatagaaatccaataatccaatagaatagaaagaatagaagatagtacatatgcactcttagttcagcccttcggatggtatgaaaggtatgaatatcttgctcgcataaaccgggccttcattgcctggcactactctctaatttgataactaaaaaaagtgcttccgctgctgagcaaactttgtagtctgtattcccatcaggcctaaacttttcgactaaaagctaaggggctaatactctatgccaccctgagttgacttgagattattggattgtgccgatggctgaagtgtcaacttcttttgtgccgcaacccgctgctacttagttccctagctagattcagctgtgccaggcaactccccgatttgtctaatgacaacctatttatctgtcaaagccacaacccttccctctgcgaagtcactccaagtctgcaccaaattccggaatcgagatggagggctaacggctaaagctatgccgaagacaatgctgatgacgaaaacaatgaggcggatttcggactgtgttttgactacaagggataactccacctgatccctcgcttttccactaaatgggcgctcactaacacatagaagggaggctagctacaaagaggtcaaaccttgcgattgccattctactgcttccccccaatggggatactaccaactcccttatggttagtcccattattgatgtgacttctttgttttgaagaagcatctcagtctattcttctactcgccttatttgtccaagtataggaataaaaagagaagtttttgtcttctgactaggattgcgttagcctaacttggtctgttcatcgcgacgaggagcagcagcggcaacatcacataatcaatcgaatcccacctatctagcatcaaagtaacggagggtagcgttttagcccaactcatggaatactacaaagagctaccaatgcaaaagaacaaacatggggagcagcaagagcaagatgacaagcggagtaaagcagcgatggaaagcatcaatgcgacaaagcaacagtcgaagaaacagcaagggcaaactactatcgtccgggcgctaatcaatacgaaaagagggacacgcatctcgagaccttacctcgtcgagtcgtcgagagcagtgatcgggagggactgacgaccttcattctggtcctggaatcctttcaatttgaaacgcgaaaggtgcccaatctcatcaccggtgcctgcagccaattagctagacccaggctcgtgattagcccaagccaagaagctaagaactggaatactggcatgccctgtgccctttcttcgattggatcttgaccctgaaatgctcctatacccggaaatagttctcaatggacttgaccactcttgatagtcaaccgatgcaccatgctatagaatgctccttagtgctactggctgataccatatgactacattacttttagaaatgactctacgcgagatgactctatactcaaccgataaacagtcacatcatttttctctgtgttaagtttgatatgtgatttttctgtaaaatccttagcaatttctactccctctcctctgtttaggaatgatcgtaggaccttctctcttcctttgactaccgatagtgttgctcgggagttttcgttcctttggcttaaaagcatacgtacttgcttcagaatgcactggagtccccgtttagaacaaaagttagttagggtcgcgagatgggctgtcatgcaaaacccggtccagggctctcgtccttatatagaagcgtgaatatgctctctttccgccaccaaatggtgggaccacgacgctaaagcagacagtgcagacactaattcctattatgaccagctcatttcagacaagtctatcccatgcttccatctgataaagggttaattagtcgatcgttaacaaaagtcaaatcgagtccagcagccacagctcctcggctaatctaagtccttactttgcatgtcaatcctagagcgaaaatgaaatgaagttgacagagacaagtggctttttcattggctgcttgggcttggatcccggcttgctcctcaattgtgggagttggtcaccattgtttcgtcaccatattgagtgctattatagaatagtgggaattaaagtcagatgccatttccttgacacatttacatctccttagatcttgagatgagcgtcacgatctataccgatcccatgcagtagtgggcttatcgagaaatccattccatctcccatagcgagaaagttaccaacgcgatttcctttcgtaagacctatattggaattgcaaaagttcatctcctatagttatagtagcaaaacctttaaagcctcttttcttccctagaggcaccagagtaagctgggcaagggcacagtgcagagaaaggagaaagcagctgagctatggaagcatgagatcttgaagctatgataaccgtgctagtcgtgatgacgtaattgatatacaaaaggttcttttattgatgctgatgagctggctcaactatgacatttgaatacccttgcctctgcacgacatatggatcgaccactgcatccatagaacacgtgcgaatgtatgatcaaaagtactttccgtcttgggaattggtagaatcagaaatgagtgcttcatacagatctatgattagactaagttagggtaccagtggtgtcgtttgcagggcttgccaagggcgctacaccgccatgataagtactcgtaggaaacgcgtgggtacttttgagcgtcagatcctgtaggttgataggacttccgtccaactatccaaagaatatatgatatgctgaacacatacaagttgacatggtgacacaaagctcttcgcctgcttcacgtggtcacggtatgggcgaaagggtctatcatcacatggaaaacaatcgagcctaccgcctcacagaagcaaagtaaatatcatggcacgtcaaggtgctactaaccacttttttagcctaatcttaaaaaacagaaaagcgatagcgaatttctagtctgcccagatggtggtatccgtgactgctccgtgaattccgctaagtaaccgcgagtgctgcgtcggcgtacaggtgggagtcttcttctttcttgttgaagaagcgaagaggtgaggtttggatttggattggtctcttaggttgttccttcggtcctcttcctctttctcgaatcaaccgtagagctaggattggaaagagggggaattaggctgctggtaggtgggagaataggcttttgctcttttagattgaaaaggaaccgacacgtagtagtccggtccgtaaattccagcctttattaagccgctgaaaggctcttcaagaccacatacgctggggaaaataatcaacattataggcaagattgaaatgcaatccattccactttagtatcctgacctgaaggtgatcaccggaacgatgacactgagcgagaaaacccttttttagggaaacctagctttctctaacaaacttatttcataactttgatagaggaatcattcgaaagttcggatggatggagccttagcctttcactaatagacagaagtgacatagttgctctacgaagagcaggcaatattcttttcggactaagcccactagttaagatatgcacagctgctaaagcaactgccaattcccagaagaaagaagcctaacctattatattatagaggccctccactctgctagctgtgcccactagattaataaagtagagttccgcctgtcttttcttttgatgtaggcttccacaggttccactctcatcctttattctcttgatactgatattgatagtcttccttgcccttctttctgtgagtgtagcgtggaagtctttgatattgtggtcccaatccttttctgtatccgttcaacttatccaatttgataatatactcttctgctctgcgagcctttcattgaactggaaaaaggatagctgggattgaatggcgtctagttcttctatggcctttcttattcttttatcgaccttcaacttttgaattcaaggcttttagcgcagctttgacaaatcgaagcttctgggcgggttcccttaaaaggttgccagggaaatattttgaggaggttttcttgctggggtttcggccgggtttacctactattggatttgaaccaatgactctcgccgtatgaaagcgatactctaaccgctgagtcaagtaggtcaagctgagtcaagtcagagaaaatagacccctaaaggaggacctattgaataagtctccaatcaatcgtaggcgggtgagcgacttcttttctttcttttttgagctctcacctttagccgatcttattcaatggattgtgactttctcagctttagttttctatcgaatttccatttgggctcattggactcttttatctaaacttgagcccgaagcgagtgaaactcgtccttcatttcatacctcagtccggtgcctatgaaaaaacccatgacccttcgattgaaagaaagatctccgctctccttctttcgaagttgtaaactggtcgagtcagcttcgttgctatttattagtagtctcaaagtcaataaggtattcaatatcgacgaaattaaattaggaatcttttgggaaaaaggccctttctagaggttgtcaatttacgaattagtgatccaactgggcatcttacatatgaattcgtgctccaagtatggtagtaaccctgtctccataaaataaaggaagaagaagccaagactaagagcttgctgtcagcttctagtctctattcctatccgagtccctttttcagggataacctacctcttccgtggtacccacctccaaacaactcctaattcccctaagtcaatctgtcaatctcgagacaattctcacctaactcagtgtactttttagccgggaattcgcccgagagcaccttctactgcatccagtactggataggatgacacccaacataccagaaacggatgatctgattccattcaattggcttagattcaatagcagttgattttgggcaggaatctgcaggtactttttctaagtaagagattttgcattttttgcaaacaagtctttagaataccttttcctttgtacagctttccttgctcgaatatgaggaaaggagagattgaagtagctaaagctaaggctttctgctattcaaccttgtaagcaatgtagagttcgtaaggactagtaagaaaggaatgccattgattccgttggaggactgcgttttgcgccctttctttatctattttatcactttcattctggaggacattttaatttccatccaccagctctatcgctttagatattatctactataagagttggaaagccttggctaagaagaattgaagttttgcacatatccgcgggttcttcaatttgctttctccctcatagaggaaataggtatactatattcatccgcttattgggactccttcgtttgacctatgcattctgttatcatttccagttggacaacccatgtttacaatttgaggaagaaacgaactctttccatttcatttttttttaggaaagcaagtcccttcacttctttaggggcttggagcagatgaagccttcttcggtccgctttggctcctgatcttgagctcgctggcctcagacctggcttcttcttatgatgtagttgtataggaaccagccactacactagagattttaacataaatggactttccctgggatttatttactaaagggtagttctttgagtcagtggatgttacaacgcatcaatcagattctgacctgaaaagaaatgtgatcctcgaagcaatgaaagagcatcagtcccatcgccgacttttatttccccttaatcccgttctttgattcagatttggaaaggggaattgcaactgaaagattcgctcatgcatttccttcaggcaggaatagtgagttagtcaatgccacacaactctttgaatttgctgcaaggacaggggcaagggagtcgaagaaagcaaataggttctctatcgcaactctgctctttactttagataaagaggattctgcgcggaaagacagatcagcttctcaacgttctcttccagctatcaaggagacgaaaagctatgtgaagtcaaatcaacgttcaaagtcatgtgtgattagggaatgaatgtagagtgagaaagtttcgctaaggcgccgtctaacttgagctctctccctatgtatggtcgatatcttccctctgaaaatgctgttcgggcgtcaagtgggaattctctttcaagtcaagttcacttaccgcttccactctctcttctctcttctgtcgatgcagctcactccggggcaagtcaacggatagatggcctgctttctcactttcatttggcttattcgatactgctgaaaggaacgaaccgaacctgacctgcaccttattttcctaagcaaactcccattgactggcgagttatttttataccatttagctcgcttggcctccaaaaaagggaattggaaagaaatctcttatctcttatctccctagttctacctttcttatcatttgtagagagctagcttattagcaaagaaaagtcacgggagatagaagatagaacaatgattgaaatgatcagccaaagagagacctcctgagctgttgcaagtctaaatacatatccaatagtttcttcagagagagtacaaaaaatccaggactttcagagttgatcggtgccaggcatcatagtctgggaatctcctcttctgcatggctaaaggtgaggttgctgtatttggtccaccagaatttactggccgatttaagcctagtggaaagggagggatatataaataatccaatggttccttctcttagcgtcagtgaaccaagttcagtgatctaatcagccacgaaaagtaagaaaaaaggaacttttgagctcgtcaaccacttcggtgaaggaatgggaatagacccgatctagttgttgttacagtgttccctcttagatggagcctcaacagcagctaggtctagagggaagttgtgagcattacgttcatgcataacttctataccaaagttagcacggttaataatatcagcccaagtattaataacacgcccttgactatcaactactgattggttgaaatttaaaccatttaggttgaaagccatagtgctaatacctaaagcagtaaaccaaatacctactaccggccaagccgctaagaagaaatgtaaagaacgagaattgttgaaacggaagatcaatcggccaaaataaccatgagcagctacaatgttgtaagtttattcttcttgaccgaatctgtaaccttcattagcagattcattttctatggtttccctgatcaaactagaagttaccaaggaacccatgtatagcactaaatagggagccgccgaatacaccagctacacctaacatgtgaaatgggtgcataagaatgttgtgctcagcctggaataatcattagaagcacgtaccggacacctcacctattgtcgtctactggcggccatttgtcataaaaataaaagaaagagcacgccgtaagcgcacgaaactatgagctcctaactactgtgtaatcaatatctccttacccccatgcatactaaaactaaaagaataggacaaggaagtgacatataatactaatataagagaaagctggtattcaattagctagagagggagacagggctaaggcagatgccagtctaatcttccttagaatggcttgtgcaattgaagctt

SEQ ID NO: 189 - DNA, 88249 bp, Arabidopsis thaliana
aagcttatgtcatgtgtatttgatgaagattcttagtaaacttttacgcttgcttcaaactaatgtattctccacctttgttgtccttagttaaaatgtcacgccaatgttaggaaagcgtttgaagattgctgaatggtataatctagtgccgatagttaaagtaaagatgcagatagaatagttgataaagtaaaagtgtaatctgaacgtatatgtaaattaaaattttcttaatgttgttattagtagaatgttgttaccttgaaaaaaaaatgaaataaataaccatggttgaacttgactcaaaatgttcttcttttaaactggttcgggttacaaaactagtatgttgttgaattttgaactggttctgaagctcccggaatctctcaatttcattttgttcttgtgttgttgagagataattgcttctctatttaacatatttttggccaattactttactctatcatgcatagcttgggaaactcatggctaaagctgttttaagttgcaatgaagaatcaattccttctgaactaacttcttggaagaaaaacagacaataagagtaccattgtttacttctcagttctcaatcaccatcgaattagatagatatttatgaatttggattaggcaagtccatgaagactcatttattatggaaaactgagcatataaatgagctactacagttgaaactagtttttcttaatttccatgacaagataattatagcagagatcagaagttacaagtgatcagattctaacaacatttcactgagaagctctgacaaagcttgaaaaagttgaggagtcatcttgcaaaagatgttgtggttttccttgttcaacaagaattccacgatcaagaattaggatgctgtctaaatcaacaaccgtagaaatgcggtgagcaatggtaatgacggttacgcctttgcattcactcgatatcgtgttgtggagtagggaagctgtgtgaacatcgatgttggcggtgcattcatcaaggcataggatcttagatgacttgagcaaagcacgagcaaggcacaaaagctgtctctgtccaacagaaaaggaacaaccagattcctttacatatgaatctaaccctcctacactttctaccgctgccttaactttacacttgtctaggatctcccagattctccaatcctcactcaacccaagaggatcaaggttatccctacgagaaccacaactttttttcattatgaaactgcaggcaacacctttggttagtgaattgaaggagttaagttctcacctcagtgatccttgaaacagaaaagggctctgaggaacaacagcgaggcaagaacggagttctcttatcggaagatggcttatgttttttccatccaccaatatctctccactacaaacaggagtaagccggaaaagcgcattcaagatcgaggacttcccggcaccagttcttccaattactcctacctgataaatgaaaacaaaacaatcatgagacagaaaaagtcaattctgttgtagagtgctctctctagcggatagtctcttcccgataacttcatataaattgtatatgttgggagaaaagataaaaacagaaaaagtcaagtctgttgtagagtgctcggcgatacacgtacatgcattcctccttggattgtaaaagaaatttgggtgagggccggaggcagagttgagatgtatctcattgtcacattgtgaaactcaactaatccgtgaacaggccacttatcgctgagagattgaggacctgaaacttcttcttgaggcacatccatgtactaataacacaggagagcatggttcatgtaattagtaacactaacatacaaaaattacttaatgaatcagaatcattatctttatctttgatttctcgtagtgcgaatgtagaagtggataatttggcacgacgaatttgtaccgaaccacatcatatcatatatgtaaacaacattcctcaggaatggctcttttgagctgcaattaatttcggttgacaaaccaaaaaaagaatcagaatcattacctggagaaccctttcaacagaaaccatttctttttctgtttcagtaaaacttgttaacaagcttcctaacagagaaaccaatggagctgcatatgagagcgctaatcccacctgtgatccaaattataaatagtatgcttttcactttcctatatatttatgaaaactgcagtttcttaccagtccaggtgtaccaaaactgattggaaagttccccccggagccgaggacagccattacagcgacaaataagacaatcattgatcctaacaactgcaccattttactcaacttatcagcgatttttcgagatttccatatttattgcagacacatgaaactaaacattgttaccaattctcaaaaggtgaatgaaaaatgttctacaaaatgtaagcaaagatgtattagtgtacctgaagacgcaaggagagccacaagcttgcgattatctctgagtaagaagtccgctggtatagcgtcaaatgctcaataaatctacctacaaaatgctcctgtcatgcaaaccggaattagcatacagttttgtcattaatggagaagcaaaacctgacatttagaagcagaaccaaaactacctcagacttaaaagccctgatagttgatgacccatcaagtgtctccgtgaacgatgcatatatcggtgatcgtgaaacactgtccaaccttcgtagttcccttgaagtagacctgtagaagacctgaagcaattttcagttagtagaaaatttgaactcttcttcttctctaagggacaccaaatatgaaatcagattggctacaagaagttgtatatgtacctgaagcttgctgtatatgtaccaaaatggcagaagcagaagcaggaatagaacctgtatacatattatacattaatgtaacttctccaacaaaacagaagagttaatacttagcaaaaagagagaagagtttcagacaaacctgaacataagacaatactacaataatccctaacaagccaacaaaatttgctagaagaatgttgagaataaacgggagagagtcgtcgatggtatatagatcagaggaaaacctgaacagagtaaaaccaaaaaaagaagttaagatgaagaacaagacacatgattcaaagagtttccttgtgtctaacctattaagtattcttccacttggtgtctgatcaaagaactgtgtaggtgcatttataagcttactgattaatgcattatgaacatgcactgctgcttttaatcctccaaatgcaaatgagaatgccctcaccaaggttaatattgagttaatgatgcaaaagatacagagaaccatctgcaagattagtagttattattaaactagaaaaacacagagacataagagttacgtttcgtggttttatgcgcgagtttaataccaaataaaacgaggttgagtaatgcgatactccttttcctgtcttgtcaacccaatatgatagccacaaatcatttccattacgagacccttgcattaaaaccgctgaaaccaatattacaatagtaatgaaccaaccagaaaacacagcatagttcctgcataaacagataacaatcacttacttatacatataggcaacaaaaaaaagacatggttaagcaaattttgtttacctataaaccatcatttcaactcgaccctcttttcgttcctctaatttgacgatatccgccgcagcttcactaatttcatctacaccatcttccttgatagatagagtctcttttcttttggtcaagtgatttggtgatgacatatcaaattcattggttaaagaaaatgttggagaaatggatttgggcatatcagtaacacttcctgaccaattcacttttcctttgtccatcacaacaatcatatctgcacaagatatcgcctgtcatagtagaaacagcttgacggtatgagaaaaaattaaattgagatagataaatatttaacgtgtagagagatttgagacctgaatgttgtgagtgcacataacacgagtctttttgttcaacagaggacccagaagtgctctttgcaatatccaacatcctacttgtgaatccactgcactcagtacatcatcaagaaggtacatgtctgaaccatgataaacagccctattgataaagcacacacaaaatcatcagaaacacaacactcaagtctatggatggtgaaagagcataggagatatatagcaaacctggccaaagcaaaccgagctctctgtcctccggataagtttagtcctttatcacctatacacgccatgtctcctccgaccataagtgaaatatccacatctagtgcacaagcactcaatgtctcgaaatacctagtttaacaaagtcaccactagctttgtctatcagttacactagatcataactttaagagttgatgaagcaaacttactaaaccttttggagtcaaaaggcttcccgaataaaatgttttcacgtacagttccagacaaaagccatgggaccttgaaggtgagtgaggtacatgtaagacttctcatagtggaaaccaaaaagaaagtatttaaccagtttacaaacctgtggtacatatgccacagagccatttaatagtatagatccatgaacacaccgcatttcgcctaaaagtgaattcaacaacgatgttttacctgaaccaacctgaaaattaagcaaacaaaaagagtttaagaaacacctaatcataatttaatcgaactatgcagctctaacggtggggacgattcgtatacctccccgataactgcaacaaaagatccctttggcactcttaggcttacttgttttattgtcaagttataatcctcttctacgttacttgaccaagtacaagatgcatcttccacacatacagctaagtcttcagatgtaaatccagaatctatagaaaaatctctactatgctccaaacaacacaagaacttgctcacacgcctggtggatataaaggcctgcaacaaggtaacaaaaatgatatataactaaaatggtagataaaaatgcttcttaatatgatcgaaagataatcttacatcaatgagaccgttgatgacccatggaaacgagtttaatggagagattaagctattaaacaaagcaagacaagtaaacacctggaaaaaaaaaaacaggattgtcaagaaaattttacatatttgaatcagaaaatgttatagagcagattcaaaaagtaccgttgctgcatcaagttgatgacccatcagagcaaagagaccaaaagtgcaaagagaaaaaagagttggtgttgttgcccaaaagaaaacacaccaagcatctaaatacttccgagtctagaaaagccaaacgaagacttaaacgttaatacaaagtacttggacaaaacagcaaaaggaaggatacgaagacctaaccgctaagtgagtcacttcggtggctcttgtttccttcaaccaatcagcaaaccagttatcccatccatacattttaagtgtgcgtatgtttgttaaaagctctcctgtttttctaatcctgatagataacaaaactttttacaatgtgagaaattactactaacatccctcttatgatcaacacttactaaacgttttctcacacctctcatctttaagcttcatcattttctctgttgcagatgcaatcagcaccgatatccatttattcactgccaaaaaaaaagggaaaatgagaaaaactggcatcaccaacgagctattggcccaatactaaatctccgtggaggtgataggttcgaggcacgttgggagggatttctttttcaaaggagatgaatctaaaatggtgtgggtctcgcctctaggagatgtatggcctttgggcttacacttccagatattcaaaagaaaaaaatgggcattctatattgtagttacgataatgtaaactgggtacctggtatcagcaagatggtgattgcaagtccagaaagaaaagcaaacttgacttgagtatacaaaagatacaaagctatcccaatttgcaaaggcaggctgagacatatatttgaatgaaaaattgtaagagtggccaatttattgttactcaatattggaagcactttcattgtttacaggcaaatgttcttacctccacaagtcatgcaaactgttgcacaagttaacaatgcggtcagcatctaccgacataaatgtttgaatctcgccttcagaaaatcctgaccggtttgctgtgttcacccacaaacactgcatacaatataatttcataaacaaaaacagctctttaccaaaagaaccaaaacgtttgatactatgtatgaagttatatatcgtatactcaaaaggtgcgtctccgtttgtagtaacggcaaggagatatcgatatctttaaccgaatactcgctgaagcaaagcacaaatttccaaaaccatactgtatatatacaaaattcttgtgataatagttcactttcaagaaattatggaaccaattactaccactcacaataaaagttttcacttttcacatgttttaccttcctgtagatgacactcattatactagaccgtagcttgagtttcagctttgaaagacgaaacgtgtattgtgtatcaagaaaagacctacaagacaaaaaagcatacatcacaagtgcctagtaactattgctacacttggaacacatttgagatgacaaaaaaatgtagaaatatgatgactatgcactatatttacttaaagatagatatgaagcccaaggagatagcaagtgtatagccaacagaacttcctgaacctgtttagtttataaacagtgtcaatgattccattagtaatcatatttactaaatctttaaaaagattctcaacctttttcaagatacttgataagtctgttgagaagtaagggtccagcaaatccaatgcaatcattgaacacctgcaaaattcatgttttgtagtagcaatattaacaaagattatataagaaagtcaaataagcaacgtacctttaacagtccaagacgaaaatatggccatccatatacaccatatattgaccaaattagtgatggagttgagtaattattacactcttgaagttgccaacatctcaataaattctcacaacatgtaaaaggatccatttcaggtggtagtgtaagtagattttccaattctagctgcttcaccgagccatgtttcattattgaaccaatgtacccaaaagtgaataagtcccaccagcttccatttttctccttcaaagaatgaacaaatctattggtctttaactactctttaaactagttagttacaaggaagagacgtcgtacaatgcgcttttgatcatcgtcgtcttcaataagtggatcttccaaaggactacaaggagaataaggaattaaacaagaaatgaaaaggaaaaaaatattaaataagagaaccatattaaagcatatacatgattttgggatgtgcctgctttatcctgaggacattaatagagataccaaaagcaatgtccaacatgatgaggcaaatctcctgtacacgctccaaattcggttaaccaactctacttatatggagaatgtgacagattcataaagacaacttaattacctgtaatgtgaaaatcatgttaagatgaagggcatctgttaggaatctaaagatccaccagaaacatagaatctggctagtgaaaacgtggcacgcacaacaagcaaacttcaatgagaggatgacggcaatctacaaggtaaaaaaaaccttcaaagcagaaacaaaagagaaagacaaagacagagttctgttcgtgtttggtaacaagaagcttacccacattacgaaaccagacaaggggacaaaacagagaatgacttctctcctacggtttgttctcacaagtaacaccaagtccacacatgacaaacaagctccaagtgcaggtgttacatacaacaaacacttctcaatgtagcttttctaataaagaaaatcaaatgaggacgaatcagttctttttttttaccaaaaccaaagtagaaaattaggcttactcttacccttctgttacatctaccatttcttctcgttatggtgagaatcagaatcagaagaagagtaactacatttgctccaaaccctaaaactgtaatcattcttaaggaacaacaatccaaaattgagcattcatgtatctatatacatacgcaaactcctataaacccatgaagttcaaggaaggatatatgtcgcctaaacgtttcaggtttgcatccatatagagaaactgagacaaagattgataaatttttcatcatcaacaaaccatagagaaagtaaagaaatagtgtacttacagtgaaattagtgagagtgatagccatggattctctagggtcccaaaacccttcccgatgaactgttccaattctttggttttctatatttaatatttccagagtagtgttttagttcatttttggatatatttctacgtttattagtaagtggtgtgacacaaagctggcatcattaaagttaaagttaagttggaaatggtccattgattaaaataatgactttgactgatataagtgttatacatgcgtgcgaggatcactgtaaaggatgacgtggaagccactcatctcttgggttttctacccaagtgtctgtccacccactttcacttttatagaaaagttgctagtgatgtgcatttcgatttatttatggttcgttttgtttctgatttgggtcagtttgactaatttggtttttattagagtatggtttagaataactatgattgagtctgtaaactggaatgaaccgggtattaacgttccttttataaacgaaaatgtaataagtccagattcgtgaaggaataatatgagactaagtgagccacccgcgccttgcgcgaccaaaatttgtttttttaaaattaaatttaaattttaaagatcaagcataccaaaatttttgaaattcgaccaaaaaaatttaaaatgagtatcttcttgaatcaatcataatttagagtgataagttagagacatttacgaaattaaaaaatatatattatatggatataacaacacctatatttatatctatttacccgtatcaaaggcatgtgtcatataatgtttaggatattaactatcacattgtacccgttaattttacatttcaagtcaaggatccaaaatactttttataggatcaaattataacttgaataataagtaattaaaaaactaaaaaaatcttcatttcttttaaaaacaccaaaatttggttcaatatttatgggtgaatcaaacaaaaaagttgaaaacaaagaaatagtatcaaaacacaaagtagaagaaaaacacgataaatctttaaatgtttacataagaattagtgattttaaaggtaaaaacaatagaaatataaataatatcataaattttaatgggttacaatgcgaatataaaattctagagagaccagttgacctgctttaatcttttttgggtctgcctatgcggcggacccataaataatttataaagtatcaaaatataacttcgaaataataagtaaccaaaaaatttaaaactcaaaaaacttcatttaaaaaatagataaaatatggttcaatgtttatgggtgaatcaaacaaaaaaagtaaaaaacatgttagaaatagtgtcaaaccacaaagtagaagaaaaatacaataaaacttagaaggtttacatatgaatttgtaattttaaaagagtaaaaataaaaaaatatatataaataatatcatgaattttaaagggttacaatgcaaatgtagaattctaaaaagaccagctgacctcctttaatcttctttgtgtctgcctatgcgccggacccataaatacttttgacaatatcaaaatctaacttcaaaataataagtaactaaaaaaatttaaaaaattcagcaacaatgagcttataaattcatcaaaaaatcttataaagaacttgtaactctcttaattggttttacacaaagtttcgactactttagcttgtctcttgagatttcttacacacaaaaacacagtctcttatcttttggtacactaaaacagggtaaactttactctcttgaaataaaaaagcttatatatgctactttttcaatctagacattctagcgcctaggacccctactgattaacttcaaaggtctcaagaacaaaaaaaggatccaccggaagcttcttcaaattgagaaatagttgagttcttccctctcgttttctggacaactttcactaaaaaaacttattcccaacggaggagaagaggaataactccaagccccataagtgcctaatccttgcaaattacttagcacccctttttaatattcatgagacttctaaaccttaaaccctaacctgtaccttataaacccagattagttatttcaattcgtctacatgaataatactaaatcctacctaataccttataaatccgaacctatatttaactttatctaaatgttaaacactataccaaataaacacaattacaatgaactttaagtcataaataattttaaatataatcgaatgaggtttcaaattgttcaaatatttttagttagatatgaactaaagatataagtttacattattgtatgtgcttccatcagttattccttaaaccctaaccctaccttataaacccaaattagttattcaaattcatctgaatttataacactaaaccctagttcctactttataaacccaaacctatataattaacttcatctaaatgttaaacactatatcttaagccctaccaaataacaccaatatttaacttagtctagatgtatgacgctatatacatatatactctaacactcatctaaaatagagaatgaaattaattctcttttaagataaactttttgttgtttttctttcgtgaaattggctcttagatgatttattttatttttatatttaaaaatatattgaacgtaagagaactacttattaaaataacagttttaaattgtaaattctacatgtcggctcacacagtacgctgggatgctgtagacggcaacaaatttagctcacaaaatcattttttcccttcgaatatacgttttcaatactcccacaaataaaaatttaactcatcgataataaccagaaaaatatggatgaagagcttgcagcccttaaaacttatccttaaataactctatcaactttgtttccagcattatatttgttataagaattttcaaaatatcttttcatttaattattcgacctatgtttctttgactactttttctggaataattgaaggttaagataaatttggataaacaatttaaaattcttcaatcagtataatccatggtaaagtaaacattaagaaattaagcaccaaggtaattaaagaaatacacataacataatacatgctttccaacaataacactatagttgactactatacactttcaaaatagtcatcacatctctttcgaaacttttcaacggattgaaagaaaaaaaaaacagagctcactcaaattacataaaagttatagaaattgagatggtaaagaacatgatctcataagctcttcttagtatttagcacttaaatcctcaagaaccacaagtgttaaagtagctgattaacttacatgagaagaaggcacaactattgacatttaccatctttttattctagtctatgtaaaccacaccaaaattagtgtatttttagtcttctccacaccggaaaaacttctagtttgggacgtgtccaataaacaaatatatctctactttggagctttataaaatgcatggccttatcaaaaatctgttttgccatcttgatgcggaagtgacttatcataccactgaacaatgtacagaagaaaaacgatatgaaaatgacttatgtactaaacaaatttagagtagagaacaatggattagttaacaacaacaaaaccaaataccgaaagtatccaccatcttgatttctaggtctgctaaatgtcttaaaagtcgagagaattgatttcgctttttataagtttttttgataaaacattctcttttacgtttgtcttcgtatattttctttttcgatctccagtttatggtgcaatgacccaatataaaattcaaaaatacttatcacagtaaaaatcaaacctatcaaccaacataaacctatcatcatcccagctcccttgaattcccagagatttaaagcaaaacctgaattgttttgattggatataaaaaaagcatatcttgagaaggtgaaccatcttacgccataaaaagataaagattgaaaactttaccttctctagacgcaggtcctcctcaaagatttttacgccatgcatctataggaacttgaataggattctttctacaaaccctgataagtaacaacaaagataaactctaaaacaaagacagaatttcacaattaaaaccccttagatagaagaacaaaacgacattagagagctagcgattggattaatttaagataaagaaaatatagttgtgtgaagaaaaaacacattaaaatgcatacttatttgaattaactacgtactgtgttattatttgttatagtattattgttctttttctcctcttgaattatcttactttttcatctatcaagacatttaaaccaccaaatttttttatactcagtagaattacatgtatgattcttctagcgagttaaaagattttctcgatttctcttttctgctttgcttttccacatccacctctttaatctgctcattttttattttctatttctctgcttacctcttgatcattcaagcagttactacatgattagaacgttggcaatgacgaacaaaggctaataacaacaaattttggttgatgtggtggagacaatcgtaacgaataacgatagcggatgggattcatgatggatcttgtcaatctatagtcttcaactggtaaactaatccgagaagtaaaatgtatgtgtgtattcggatacgtttatgcaaaacttttgttttactgaaaatggggatttctctccaaaaacttttcatattataaccatgtccttataaaaaaccttaaagttgatatatatgagagttatgattatcacatctagaaaagaatgatacaaaaagtcaacaaagaccagcttccaactttcatagcctttaaaaaggcatcaacgtttgtgtgcctatatatctctttaaagcctcgtaactctcattaatcccacccaaccttcaaaataaaaaacaaagacatgaaccgaacacaatctccagctcagatgctttctttgccacggatgccttcggtttgaggtcagggactttttttttcggctggtggctgtgatgctaggctaaatgctgttagtgagactcggtaaacccggtccattgtaggtgctacttcttgctcttttgcccccatttctctgtgattggctttagaaccgggaaaaaagagtcaacaacaatcaatcagttatgcctctcctcttcctgcctctctagctggcttgatcttagactccgctaccagagaagagcccttgtgtccctagctaatggatgcctcttccattagtgctccttcctctgatgtctccgctcggtcaaccgtctctggaatttcttactttttcggttctaaagccactccgcccgccatccagtggatcttcacctggctaggattctgactctcgaacgggggaaggcaacctattagattgttgacccgacctcagacttcgttttaggctgaagtaattggaggcccattacccgatatgggtatggaattcgtttcacctacctggtagatatgtgtatttgacctctaaccatacctttgctatctatgctccaaccatgataatgatagcgattggacggtagcaattggtgcttatttcggggattcaaccgacctggataaaccacttctgcctttggctttgcctcatacccggtctaactcaaactttgactttgctatgcttgctttgttagtatagcaaagtttctaaagctgttagcgcgtagtctgtctgctctaaaggaagtcgatttattgattcgtccttctcggatcgtcgtcggtccttttttattgggctctcatgcccggctagacgataagatcaaagtaacccgctttaatttaaccaacctactctgtaatactgttttcaccaccggtttgccatgattcataagcaggaatcgtagatcttatctaggatgttgccgtcatcttataagatgaagaagtcaagcacatttctcttcttcctaagaagtaaggctgacgggctaataagtccccggagcttcaaaacaggccttttcatgctccgcagaggccaatgaacttccgaaagcttcttctgattgagtgaacataccgagtacttaaaagtagggcattggatgggacaagccgcttcctttactttaagccgagaggggtcgtcgctaatcctttaggccgcttctttccactttctacctcttagtcgactaactcaagttcctaaacgagacagcagctaccccgcttgcctgtaaaggaaggagttcttgttccgttgacgtcgtctaactaatacatagttctgaaatagggattaatatggattgaatcatcataatgatgacagctgctaccttcccattagaaaccatctatctttcttcttttccttcgtacgaatctttgctaacttgactgtgttcgacggctgatgaccccaatgtgtgaaatatccacctccatggggatgcgcgaccgggaaccatgttgtcaggaactgagcactttcttgaaagcattgatttgtggtaagactagaagaggagattgctctttcgaagctagtcaagcgattaaacaaagtaataaacctttcgagttcttgatttacggctagaaagaaggactagagcttcataccttccggctgttctttcaagatggaaaataattgatctgtaaaggtcagcggtcgtaatctgttcgaccagaccacgtcttgcaactcttctggcgtcagggttgcgggaacctgtgcttcttggttgaaattgaagaacaactccttatgctttggagacgttctcagcaactcatagatagatatgttacctacgcctccgctaaagaaaggaagaaccgggtagctatacgttccaaacagctaagatattagttatgctttagcaacagctccgttcagggagggcggggatgaacacaccaaacggcaagctacaaagaagggtgaaacaagctacaaaacagatctgactcctacctaaggggcatagaacaaaagagagtcaagtcaaagataagagtttagttatgctgggcagttgtcttggaggagcagccgccacagatgaaggagttgcttgaggaagatgcttatttatttccataagacctacctcatggcttgccactcttacgaccaacatgggattgatttcatacctggagcaacttgacctaatctgtctccttctaattagaaaaggagtcccgctaagcacgaggaactgagaaggcaggtgcaagggctttgatagagagggaaagcagactcgacaaccacagcccagttaactatttgaatcaggagcttccgatctcatcccttcaatcaccgttactcgatccgaacttgaaccattctcttgctacttttctttcttcaaaaaaaagattggaagtggaaccgatttcccggaagaggtcttcggcttgctctgatatgataagaaagttcgctccctctccctgtcaacatacatgggattgagcagccccctatctcagagggtttaccccatggccagtttgcgatgaaagaaacttcaaaatgcagcccacatagtcctatcaacatacaaggcttttcaatccagtgaaagacaggtcgaaaacttccatatctgataggctgcaaaggaagatttttgatgtctggttctatctgtctgtgcttggtctggacccttagttcttgcaggtgtaagcgtgctccccatgtagttttcttcgttcccgtgtaatcaggtgcgagtgtaacgagtttgtttgaaataagtccaatgagatgatacgaaaacaaagagttaaaagctggcttagaagaaagtatagtgggcatggtttagaaggtaggttacctgctcgtaagaggcagtctaacttagttagaggaatgctcatcagaaggataagcaaggtttgatgaattctcctagaaggaagatcaaaagtcaaggtcttcaatagtagtatagtagggaacatatcacaaccagcaagcgtattcactattcacgtcaacattttagcaatcgaagtcggagtgagccgattcaatgtctacagggcgtctgtgtaacacatatcaaagcgtctgttgccaagtctaatatctgatatctgtgttagctgcctgcctgtctctccctgcccacgacatgggttggacttagagtctctttcttgtctgtagttggtgtattcatatctctcctttgaatggcatagatcttcgtagtaccagtcagctaacaggatcggcgtatgggcaagcaaagaatctaaaatcatcctttcctgtcagtagccgggtaggtaaagaggtcttctgcactaccactagtagtaaacttcagagaccactactgggcaagtaaaaagaattaattatgccgacgatctgatctgagttggtctagtagcgccctggtagccattctggtatcgagaggttcttgggaggaagattgtctagacttggagtgtgctaccactaaggttaaccagataagagagtcctcacctaacaagcaagtgctaatagctaacagtaataggaattcaagtaagtaagactccactattaactggaaacaaggaatgaccagcttcagagggatccagcacagattactattcaaccagttggacaacagataacaagggaatagcccggtcaggcaacttctccctctgtgcagcatttgcttcgacagattgagggggtcgtagatcaggcaacagcagataaatctattgaatgtccatcagccgtaaaagaagggcagggcaccccaggggctcatcttctaactatagggaaaagaagaacaagaaagactgtaagacagaaacggaaagagtatgcgcggactaggttgagaatctctgcgaggcagcacaccggtaaagatagtttaagaatttagctcagtgtgctgcatcaatgatcttcttattggaaagctgaagatcaaggcaccatgttcgggttggtcaactcctccaagtagccctaacgaagtaacccttcagggccaacggagtagccctgggcgtagcaaccccccgtgggcctgagggttgagggtatctgtcatacgtggaagaagaagaacaataagactcggaaaccgtagtgaccttcggaactgtgagtgaccttcgttcgagatgcagtatgaactcggaagacttgcttcgctagcaccgtatgggataaatcttcatatggaggagaaggaagactgaggaactgcacatgcggcgtccttgcgaagtaacccccaacggagtagtcctcactgggattgagggttcggcttgttgcgtgcttcgccatgagtatgaagagttgctttgctttttaaaaccgtatgtgaaccccaagggtgtgctagatgatgaggggtgaggggatggggttcctgcactctatggaaaatgtacttttgtaatagtcaaacatttcaattctaaaaatttgatagagttggtgattatgagtggagggaagtacggctaggacctttggccaagtgaaggatcaaccaaagtcgacgagttggtttatgattattgggttttcgaagagagggtttttgtaatcatgagttggtggtcgatcgtcagtagattctgagttgagtatggtttggatacaagataaggatcaagcaataaggcgacattaaactgtcatgtaatcatcatcgatttcacgagtaaggtatagaaaagcaaaattatgagtcgagtacagcttggaccttcaacactagtcgacattcaactggcatttaatcttggacgaattcaattccaactaattcggtagaatctagaatagtgagatggaagacccctctccttatcagtttcctatggaccttcgactagatcacacgagctactcccaccttgttcaactgtgtgatttgtcgttttccgagattcggtttcttcttttttcttgatccgaggtaaggtgctttttttgatcgatcaacaggtaatatagaaggatgaggctgtgatttacctagtgaatcaacaagatcgaaacacaccaatcgatcaaatcatttttgaaaaacttgtacatcgtctgatgtagccttttgcttcgcgatattcaagtttgggtttttgcttcgcgatattcaactatgcctatatgagagattgagttcacgacaatcaattccaagtaatcatgtcagtagaattgagaaagatgagttgagtatggatctcccctcggacaagtaccaagcaagatccactgtcatgtaatgatttcactaatatagaagaaaccaaattatgtcaatagaatcgagaaagatgagtggagtatcgagttgagcttggatcactcctctccttatcagtctccttcctctagcgcagcaaagcagcccgaagcactttctttctttctctagcgcagcagataggtcgcccataccctttgcccattggtgtgctgcttcattcctagcgaagcaagtgtggttctctttggttccgtagtccttttactctgaatgatattaggttggattttacttaaaggctgttccgaaaaaagagagacttctaggctcgcaataaagctaaggtcctgatcgagcaactagtcgtcctatctatccacctctccataataataggatccaccaattcttctgcgagagctactgtacccgaacagtagaaggggtggttaattatggtgtctactgatatattaggaaacatgtccagaactggcactcctggcagaacgtcgttatctgcagaattcgtggaactggcaaaaagtagattcagatttctctgtcgtcgcatagcttatccccatttttttttcagcaactgaacgggaagtggcttaggaaaggactaatcggatgcgctcgcccagcgagaaaggccctaacccttgccgaccaagaaaaaaagagaagataacgaaagggagacaaagttcctaacaaaatcataacacaaggtacccattccatctatcatatcagtcgagtcgatccgattcgttcttatcaggcggcaagagagaacttatgacttcgcggatggagagggattcgaacccccggtattcctagaaatacttcggttttcaagaccgactctttcaaccgctcagacatccatccctcgcttttgttcaattataaatataaataaaagaaagaagaactttaatggagatttatagcatcattcaagtaaatacagattaagatcgtaaaaacataagcttgtaatatagctacacctaattccagaccggttaatgcaagaactataaataaaggaccaagagcccctataaaatagaaaatatcattcatacatagcatagtccaagcgaacccacttaaaatctttactaaactatgaccggccatcatattagcaaataaacgtattcctaagcttaatgcgcgaaaacaataagaaattagctcaaggagtactaaaaaaggtgctaacggcagtgggactcctgcgggtaataaaaagctgaaaaaatgaagcccatgtctttgaaatcccactatagtaatgccaataaaaatcgaaaatgagagagccaaagtaatgagaaaatgacttgtcactgtgaagctataaggtatcataccctgaagattacaaaataacaaaaaaagaaaagtgaccaagatgcaagggaaaaacatttgtttcacattcccggaaagaccacctatttgttcctttaccaggttcagcacgaaatcataaagaagctctaccaaggattgccaagcatttgggactaagtttcctcctccctttttagtaacaaaatgaatcagaagtaggaaaaaactcagagttagcagcatgaacaaagatggatttgtgaatgagaaatagaagtttccgatatgcataggaatcaatgggacaatctcaaattggtccagtggggaggccgccgcctgtcccactatattcagagcttcttgaaaggcttccccggatactccgttttgggttaaatcatcagcaatggactgcaaaaaagggacattgtcgctttccgcatgtaaagcttcgcccaaaatcaagcccatttcgggatcttgcgttaatgcctcacacttctcgcgtatctcacattgcagctctactacacgctcatcgttaggattaaggcccggacaatcctcaaaaataccagcatgagtatcctgagtaccggacgcttgaccactagaaaagttagtgcattgactcgcaaaagatgtatcaatggtggaagcagaagatgtatcaatggtggaacttgaattaagactattttcatcaaacaaaaagattcgtcgcatattggattaattgatttcaacaaaatgattccctccagacagcttcactccgtcaagcctctaggagtagtgaagaactatagaaagttgtggttggttgttgaccaacaaaagcatgggagaaaaccaagaaaaagggggcatagagatttcttctcttatgagattgatagtttgatcccgtaagcagtcctcttcttatatacgtattattggctgctgcacttctgtcactgactcagtagaggaggcaaagacaaacggattgaagcccaataaggaaagagtctgcctcaagcctgtggaaaagcccgtacaaggtctgactcgtgcggtggagctacacatgggtgatttggaagggcaagatagacctgaccctataagtacaatggttggtccctccggaaccggtaatctccgtttgacttcctttcagcaggtgcgcagcaagtattctttcacaagaaagacgcaacccagcccccttagctacttgtactaaaaaaaaactaggacggaaggaggaacccctgcttatcccggctacaataaataactatcgaagagcgatccatctgaagaatggcgctcgtatatccctagacgtgggtttgtacttttttagaagggcgaggtttggaactctcaagcaagacatgatctacataataagacatcataggcgcctagagataaaggtacggttcatcgccttacttatccaagcgtgttgccggatagtcggatatgactatctctttttttatgaggttaggaaccatttgctcttagcagcattgctcattattattaggtaacgcattcccgtttatcgatttgaaggttagggtgacacgttgtcgctttcgctttaataatgaatgatatggagtcatgcaaggagcgcgctttattatataatataaagggcttttcaccatctatttctgcccgaactcttcctgagtctccctcctagcgaacgggattagatacctcactcgcattcgcctaatcaagcagaacgccactcggcgatcatctgacaactggtctcgcctatagtgtcgaacacacataagtataggttttgttgtccttacgacggttgggttgtcaaagaccggatctttgcacttcgcgatccttatccgagtatgggctttgtgcaaggcctcatagaacaatgaagtaatgtatccatacgagctccggccctcagcagctcgaatacaaaataaacttgttcatttatgttaccttttgtggaccttcaacctttcacctttcatagatctgggaaaggcggttttggaagtgacgttgagactgggcacgtacgagaagtaataaagaaagcaaaggggaaaaaggggtcacctgtatccgtatccgtcctggaaaagcgcccttcatatctttgcgaggacagaactcaaaatgaaatcgaaaagctaggaccaaactcttgattagggatcatcatccgcttttaagctcgacaacggcagaatacgtattggaaacctttcccatagaaaggcttgaagacctccaaactcaagtattcccaaggtgcacactcaatgcaaggtttccagcagacaaatgataggaagcactttcactcgattgcattggtctaaaatgctagcttgaaaaggaagtcccttacacgagtccaattcttttttggttattagcaagctttgaagaacattttctcgatcttcacttcaactggccggatgtggatggaacgtatgctacgagtgctttagttgcgacgtgggtaccggttgtattctaagttgattcaacaacagcctaagtttccttatttcatcaaatttcctgttagcaggatcgggtaggatagtgagtgtcaggagaaagaaaagaattagaagcgtctctcataggttcaccaatttattgactcttgccaggtagcccgatgtctcatcgtaagatgttggtgagtcttagaccaattggggccaaggagggtttggttaataaataagtattaaaggcacgacgagcgcaggcatgtgattgtaagggatttccagtccctggctagcgatgatagcgatgtaagcccggcaagcaaggaaggttgtaaggggtttcaagcccctggctagcggtcaagtaagtaaagagatgtcggttgcttgaggtaggatttggaagtcctaccgagaccggttccctgtcctataaatgtaataagtaagtcggctctgttgtgtgaaaatggtaccggtggttgcttcgaaagcgtagatcaatagggcggtgtagcggaatacatggctaaaacctattattatttggttgtgtatgtcggttgaatgtcccaccaaggccaagtccccacgtgatgtgggctttctagatgtctttgttcctgctttgagccgagtttgggtggttctgccggtattggtttatacggctactctcgaatttcggggtgaaaaaggaccggactgttttccttccctggaacctatgccatcgagaaataaggaaatcatggttttgataatatcggggttattaaataaaggaccaatgtttattctccttaaagatgatctctgtcatcgagaaatgtataaataatggtttcgagactcatatataggggttctaaagtctccctcgaaccccgggattgatgaatccccgtccctgggtcgccaaagagatatgtctatagttgaattcgcgcgtaaatccttttgaagtggaatccggacctttgtctatagttgaattcgcgcgtaaatccttttgaagtggaatccggacctttatgccgatgcgattgagatcatctctgtactgtgggcgaaacccgttgttggtgatatgatataaaagtccgctgatcgtctagttcaataaaataaatagtaggtatccggttcaagtgcaggcgatggactttgaaagggaggtcttctctcagtgctggcttctccgtcgcgctaagataggagcagaggagaagtccagttttattaataggagagaaagaaagatagaacgaattttgttgctttagatagaccgatgtgttttctttcttcatgaataaaagggcaacgattcgagaatattgttctaatagagggagttgctcttttcctctttgccctacttctgtttcccgtaaatagtatgcgagctgatggtatccttagctgtattcctatgaaatggaagggatgcaaataaagtcctattttcaattccgagatactcagatcttaaagggtttctcaaacgggaaatcttaacagaagaatgtcaatataaacaggatagtactgttccgaatcctcgatctagtaggtattcctactgtaacactatacagtaaagctcctttttaagatcacaacccagcacagaggagtttgttgcgtgggattaaacgcataattcgtgcatccgagaatgggatgtcaaaccctactttcctcaaatacgaggaatggataagccaggctagtatgttctgctaactacggaaggaataagaaggtaaggactcaaccttagctgtgatcttttatagcacacccctgatacacgctggtgtgcttgtgctgcagtttagaatgctgattcctgggtgggtagttcctactcttgcttcccttggttttagcaggtatttgtttctagcttcggtagttaaccaactattcccttttcagcacactctttggcgtgcgataatagtacacttttaggaatcccacaccaagtgaacagagttatcggctgatactttccttgttcctagggttgagcagaagttggttgactagctactacttgaagtcagcacactcctctgcttttccgatgctttgaccagctacttgttttcctaacccgagctaatcctctgtgctgtaatggaggagtgtgctgaataggacaggtaatctacaatcctacaccggacgagttccttgtgatagcacacccgaggattagaccgaagtttccttatttagcacactcttacacgtgagcacgcatgcaataatagtagtagctctcttctgtgctgccgaggtttgctttcttttgactgtagatgaaacttttcaaaaaaagattgctctttcccttagaaatggggttgctaacttttacagctatatgaaatgaaagttggcgattccttctgccatagtagagctaaagccgccgtagcagttcagtgtatcataaggtaggaaaggtcgtcccctcttgctctagcagtcaacgacagaaaaaagcagggacgtgttatggttaccagaaagggaataaggaaaggaatctacatattaaatcctctatcggcacaaagaaaatgcaggaaatggacatcagagtgaatagtttcgctggtaactcacctctccgatctatctcatcttcagatactttacttacgaagccagtatcctcttcttaaccttctctctttcttctttccttcagcacactactttctttctctttgtttgaagccaacttcagcacactcctaccgaagcaagttcccttagctgcccttcctgtttcctcagctttaagtcctcctgttccggcagttcacctcttcgtgttccgtctaataggtaagattttttccccaacttgcttgattaacgggcattttcggggactagcccgcttcttcattaaaaaagagggcgattgcccggtcctctttcatgtggaatcattttagatcgtatccccccaagcctgcctccactttcttatgtgaaagagttattctatgaaagaaaatctcgttttttcacatatacaagctaaaactacaacaagtgggagaggcaggattcgaacctacgtagaaaaacttcaacagatttacagtctgccgcttttgaccactcggccactctccccttcccgggccgaggccccctcaatgggttctaagaaggaggttttttccctgaatcaataaaaaaataaacttattgatttgattgaagggaactaatactatttcttagcttagctagcgttccgggagaatctagtcatttagtcaattcataacaatctctgtaaagcaagggacaaagcttctacgacagcttccccctcatgtagtcgtcggccttccccagccccccttcgtcgcttccggcgaagctgcgagccctacccttctcgagcctacttaaatagcttacgcttaccaagcctagtctactaaaagagggctacagtaagcaagctttccccctttgtttttgttgtgggtcgcgcctcaccgcaggcactgaatgaatgaaatgagtggtctgcaagccttccccctttaaaattaccaagaacttcgttgccactagtggcgaataaaatttcaaccatcccacccgaaaaccactaggagcctaaagagagttcagtctacaagaagctggcagagctttagccattggactacatcgcactatcctacctaaacccttttcttgtttgttcggattctgttctttttcgaatgaggctagtggagacaaattccttccgactaatgaagagatactactccagtcttcccattcattcccagttgatccttcttttcttcctaagaatttaacgaaccaagttcacctatacgagagtgaggaatcaaaaccaacaatcaactttccacttttgacacgattcagctagtttagaaacaaaggagaaggacaggggccgttaggtcagaaaagcgataactaacaaatctccccaagtaggatttgaacctacgaccaatcagttaacagccgaccgctctaccactgagctactgaggaacaatgggagattagatcttatagagttcaattcccgttctcaacccacatgaccaatatgaactcgaagtttccttcgtaacccccggaacttcttcgtagtggctccgttccatgcctcatttcatagggaacctcaaagcggctctatttatttcattatattctatccatatcccaattccattcatttaatatccctttggtgtcattgacataagagatgtcgtttctagtctatctctttctatttctatatatggaaagttgcaaaatcatcatataataatccataaattgaaatagaaaagaaaaaggggaggtttgtgatggtttttcaatcttttatactaggtaatctagtatacttatgcatgaagataatcaattcggtcgttgtggtcggactctattatggatttctgaccacattctccatagggcccttttatctcttccttctccgagctcgggttatggacgaaggagaagaaggaaccgagaagaaagtatcagcaacaacaggttttattgcgggacagctcatgatgttcatatcgatctattatgcgcctctgcatttagcattgggtagacctcatacaataactgtcctagctctaccgtatcttttgtttcatttcttcttctggaacaatcacaaacacttttttgattatggatctactaccagaaatgaaatgcgtaatcttcgcattcaatgtgtattcccgaataatctaatttttaaattattcaaccatttaattttaccaagttcaatgttagccagattagtaaacatttatatgtttcgatgcaacaacaagatgttatttgtaacaagtagttttgttgtttgtgtccgtatgttactagttgagtgggctttccctttgttccagttatttctggtcatgaaggtgtaggccaaggacggagtcgaaccgtcattacaggatttgcagtccgatacatttccattatgttacctagccaaacccgccacctcatgtgccaaagtaaaacggttgttctttcttccctcttttttatacatatgctggggcgggcggagcgctctatatgaccggcggcgggttaccagagaggaggggacaacttctttctcccttgccttgctcaattttcgttttatgattgaaagtagcaagcaactctactactagtacagaggccagatagaaggttgctcatccagcccagcggatctattgtttatgcagcagtgcgatgcggctgaaaaacataagccccattttcttagtaagatgagtaaggtataggtttgggaaaactccaaaacaaaggttccaaaaaaaaagacattaatcaaggtgacaggattcgaacctatggccctctgtacccaaaacagatgcgctgaccagactgcgctacacctcgcgtctcactgtaattgctttttttttttcatctgcctcctgcactatacggctttttgccttcttccttctttcacttgaattttaaaaatccggctcgctctcggctacgtgtccaaaggaccaaaaggccattcttcatatacctcagctccgagaatagaagtggttgtggattcgaaccactgacacaaggatttacagtcctttgctctaaccagctgagctgaaccacttttccaaaagtctcttcttttcttcatcgaagagcgccctaccttaccacttgactagtaagggaaaagccctttactaatctaattaatagggaaaacttcttcgtcaagctttagagcagctctttcaattgacgactaatctcccaacatgctcaagaaccgagagccgcccagggactggacggccatagggagcttacttatgaagataggccggtcaaacaaaaaaacgcgcaacgggctccccgctcctagtcactaagtagtgctcttctcatttcgcccgcccgtttcacttccgcgccggaggaaatgggattcgaacccatgatacaatcttcttgtatgtcgatttagcaaaccaatgccttaagccactcagccatccctccaagttgttgatcggaattttttaaagagtcaagtcttacttatttaagctggaattaaaatcttcttctcttatgatattttatagagtttcgtttcttttatctatctccccattcgaacgagagaattgagttgatagcttcagtagtggttgcttgatggtgtgtagtgggatgacctcgtagcgatcatattagtatgtatatgagcaggactttaaagatctgatatctttcaagaaagttggaccatttatcacatcaaggtaactacgataggcaaaagaagactcttaggtcgttgattcaaattctacctatatttgcattcacttaatggtcaaacgtacaatggaattgactctaacatccgatccggccggaggaaagacttactactacaagggcttgtgccaaccaacaagaagggggacggagcaaagacatctcttggccagaaccggacattgccctttaccatctcaccactaggagactgggactcgaggcgtggttaagtattcccttccgctctggaagtaaatttatttcctatctttcggttccaaatctttttttcttataaagagtgtattgtatggtccagttggtgtggagagatgggtcactcttgcgcatctcgcgctgtggtgattggtagaggagccgagcgtacgcaagaatcaagtgcctcagggcttccactaggcaatcggaccactacatcgaatgaaataaactggtttcacgctgcctgaggtcaagtcttccccgctattctaactctaaatcccggtcgcacccttcgcacaacaaatccactttgaggcgtcggctgaaccttcgatcctttaggaaatgaccagcaacaggaggatgagatgccgaggaattttggtgctaatcccacaggaccaatcccgttgtttgggccagccgagaagacagacagcgcactcaggactaggcccgtatccagaacgaatagaaggaggataattgccatttttatgctaacaggctgctcaacttttggaatgagaaccaaaagagaccgattaatctccgcgtactgtctcggatcactcatgggaacgggagtgggtggtccctaggaacggcggaaaggaagtactggttcaaccagatacgagtgacggaaccggggttgatcaaagacatgcgccgagtgccaggaatgactataagccgatagagtcgttgtggcatgccatgaaccgagatacaatttgactagtgccaggtacaagaaagagttgattgcccgaaagagggcagcgcctcgcctcaaaacctgtgtggtagcattaccccggtgcaagtgtctcctctttggttgcgggccttagctggatctgaatcagtgggcggaatcgaagtgtaaataggagtgctctactccgaatcaggtggccttgggagctctttagttaggtaacacaaggctcttcaagaccttgtttgtgggttccattcctaaaaagattaggtccgtgatggtagtggtggatcgcttttctaagtatgctgtgttcatagcagcgcaacatgcatgcaccgtccatgatgctgcggagttgttccttaagcatgtggtcaaaatctttggcttgcccagggatattgtgagtgatcggtctggctctgaacctacgtgcctatgacttcgtttcccaggaaatccgtacagcggaagatcctgaatttgagactttctacaccaaaaatcttctttgggctatcattccaccaaaccctagtaaaggaatctttaggttttggtgccacatctgtcagattggagccatcctgcatccaagactttgatcatctagctgaggaaattggtaaatcttatataggctctcgggtgccttcaaaaggaagttcctccactaaatcggaatctgactcacaagtcgaatagtcctcagcatggagaaaagcggggcacattggacaatacaccataacttgcttcttcactcgagttgctcctcacgtacgcatgttctaatagtcgagttgctgttgctaaagcacctatggttccatccctggtaacttcaaccgctgcctaagatccttagaaaaagagtgtcgataagcggcatgcttttaatcgatctaagaactgtgttcggcttctgagtccaaatcccaactaaggctaaacaagaattaatcgcttatgaaagagatgaaattgcagaatccgttgatcgatccatcaggggctttaccctggcacttcccacttactcctagcagcctttctttcttgccattgaggacgaagatggctatttattagaacaaagacctgaagtttacttctattaaagatctgagccttacgagacttcataaagatactgcctatcctgtgcttaccttggtctgtgctgcttcgccggagctgctaatgagatcaagcagtgtgctggttgtcagatttcacttaacctatattcataattcatattggcgcaaagccgtagatgatgtcaatcaaatcttgcttggtgttcctcaactctcagaatcaaaccatctccatatactggtagccaggaggagaggatgaaaagaattttattttgaacgtctatctgaaagaccacgggcggaacagccaatggcaacgggagctatcaataacagactcctgcttctagccttgagcaagcaaacagcatagaactttatatctatctagactaccattgtcagcttgagagaccagaagctaccacctctcctgatcaattgacttactatcgcacctctgtctgtgctgcatcacatctttcaacccgagcaagccttcttagggttgggactctctaaagtcctggggttccgggaatccattaagctcagaactttcattcagatctctaaagatggacctcccttatactctgaaaagactttcgaaagcataaccctactactctgtgctgggcaaacttccaatctataagattagcgaaacaaacataaaagggctctttcgctcttgtggatgcttcctaatcttagtcccctgtcagtcagggctatccacctcgaattatcctggtggacctgatagtctcgtaacaaactaacttatttgagcacaccgccttcgcggatggaagaactcaagcatctcttttgcgtagatggaagatcaggctcctccaatgtctctatataagatacgttgggaagtagtacgcactaaccaagagaaggagacaggataaacgggagacttcgctgccctcaaccctactacgaggatataggggatagcacagaaggatactatctatctccgttgggatttgggaatagatgtatgctgttaaccactcgaatgcagcacacgccgaagtattagtaggtatgctccttgtatgaccgatccgtaaattaatggccgtttctagtgtttcgcccaagtgagaggaggaataaagaataattggatgaagcagcaaggatgacacggatcaacaaaaggcgatgaaagtggacgagtaatcctgattctacgatcttcctttgtgcgcctacacacaataaagttgtcttgggaaaaagatgactgatcgactcaatgaatcgcctaacctctgagaaggttggtaataccagctttttgtttagcggtgtgctttgcttttatttttgaagagtaagagaatcaaaagaagcaggaagacatgggtattggtacctggggcaaagagtatacaaatcgttggttcgggagcacactcactcggaactattctcctccgctaaagagaaggttgagtcacaggttcggatggagccccgagggcttagggtaactttagggcatatgaccaagtcgataactcagatctgtcaacgaagatgtccaccgcctgttacccagaacaattcatctaccaacccagaagggagatcttcccattttggtatcgggatagcgaagcaacgattatcttcaatcgaaaatcaaggtctggcgaagtcttgagggctgagggcacaggtgagaaagctcagatgatagaaaaggaccttctttgacattcgagagtcgaaagccctgctgctaagatggctcctaggtgaaataaaggatggagtggtctaattccctgcttttgcatcaattgatttatcgaaccttgcgttattctattgaattacttccctgcatattagatcttctcgatagccagatagttggtggtcgtatatcagctaaagagctaatttttgtgggtttaagtatcccaaacgaagctcactatatgatgatcccgttcatccgtttacgtagaggcgtttctttagcacacccgttgatgatccaattctatatattttggttgagtgtgctgcatacctcatgacaaagataccaagataggaataagactgacatgacaaagataggaagatagaaatagactaactatataacagcttttcctccactcttttgctcgtcatcctcaacccgaatcagtaaatccctttctactagaaccagaaacggtttgccggctctctgaccccgccgcagcattatgatcaagccattggctccgctgatttttcgattgggattgactaaagagggaatgaggatcctcttcgatcttgtactcagggtacactgaacaccacaaaaatatcgatgaaactaactataagtgattgcggattcgaaccgctcacagaaggatttacagtcctgcactctaccagagctactacctgttaccactttcttttcaactcgtaaaggcaaagaaaaaagggatccgcctcgaatcaaaacgttctttcttttctaaaaacgatctttcttctcttatgaaattgatagtttgtgagagggatgcaataactcgactgtgtaaggtccaccaggtccgtaggagagtcagtctttctctaagcaagctgttttctggcctatacggaaagagttttcaaggtctttccctttccccgaagggaagttaaagcttgcctgtaaagggaagggaagcacagcaataacgcctttttccttttttctcccgattagacgaaagacgtgttaggaatagtcctttttcaacaataatggggggccttcctcgcatgatagtacatctgcgattggtttgtcttgtttaacagcatagcttcactcccattttactagtttaaactaacaagaagtctgtgctggggaaccctgagacctagattagcgagaaaaggaggatctcccgttggttaatagaaattcccttggtcattactctgttttcattctattgtaccacgggtggtggtaagctcggggaaggtagaaattgagtgcgccccgttagttagtcttcgcggaagaaataccgcttttttcaattggccagcccgacccactttgcttgcttctctattccagtagcatcaggttgagtttttttctttccgtattaccttctttagataagattcttcattgcacgaacaaacaaagaaatccgttcgttccttctaaagactaggcttttgggggcgttcggtagcgatcttatcaaagaattgggataaccaccctagcgaactattgcctttagcccgcttccgcagaactcttgggactaagattccgtatctagtactgtcaatcagaggcttagactatgtatggatgtagctcacccaagataggtaaaggggtcaaaaacttctcaggctgcctgtgaggctgcgttaaccgacgttacaacgttctttttttttacagagtcaaaacaaaacttcaatctttaagcatgggcggtggtcgaatgaatagaatgtccgagtaaggagaactatccaagcttcttcacaagcgaaggaattgcagcctaaccatctgtgagatcggagacttcgagaggctctgacgccctctttaacgccactctttccgagtctcggacatgaagcttacgattgattttgttagtgagaagctcagtttcgctttaagcccgacaagcgggtggtttggttggttgttgatagaggactcgaaatagctttatttgcaccgttcccttctttatcgaataggggttcctccgtcacttcaaatttaactagggatgataaccagagaacgctctccactaagactcccgtatgatatgcaggttaaagctcccgtttcagatgctgaaggctcgttgagacctcttatctcataccgcttcgtcctacttcagctaaatggaatctttcgtaaagccatcctgaaagtaaggtagcatatagattcttcgacctcccggtcctaaggaagtaatctcgataggaatgcccgtctacgtcagagaaagaagatacttcctcccttttctcgataaagtatactatttattctgctgctgtttctcattttcaaaacatcttgagacagatcttgcaatgtgaacagcaattttcagtttgagagagtccttacttgcctttgaaggttgattgggtgagtgtttcgtggctggcctttctcctcatcaactaattaatgcctccggacctctatcttttgaaactaaatatgctgaacaagaatagaatgaaactagcctagagcagataaggtctaagcctttcaccccttgccatccttctctgtgaagatagactgctgtttattgcgtgtcaagtgcgagattggcaggaattgcgtattcaagtctatctaagactatctatctagtacgatccagtcattcagtacagtatcttcgcaaggtctttatggaattcttatagcaggtcggtctaggtagttgatattgctcctgagaccttcgtagtttcctgtttcgtttgtgcatctttctttctttccttttgttcaagtcaatcaagagggaaaacttatactatgatggggtatttgattgggccttcctatgctgacgaatgcatccttcctcttctcaagctataagaagtacgtactttcagatggaaaggattgaactctaactcagaagtggaattcacagctattactactatagttgtctttcattaacagttcctcctgtacaagaattgtaagttgattcataaccacgctagtaaagttgcctttggaataggaagttgagtccgatcttggtactctcgctaaagtttgttgacatttagtcctctagaatagatttctttactgtagtccccatccgagtaatgaactctagaatttacttctccccagacccttcactatcttgtccaagtgtttaattggcttcgacgcctggacttttatctctagatactctttccggcttcatttaccgatcctgcaactatagaatgaccaggattttatcccgtttaaccttccacttcggctagataattgccaagcccagctgtaactatttagtttacaccctctaccgcagcttgacttttcagctatcgaacgtggccttctacgcctgcttgccttttctatttgacatccctatcacctggcggctaaaccatccgttgatgagggaactattgaagcttctaaagcagccctttccgctgctcctacatctatctaggaaggaagtccactacggtatggaggaagtagtcgaataaactgatacagcaggccaatcaaagcaatcatctgccgatttcgtagggtaccgtacgccctttgtctatggattctaaggaaagcatgccatatgatacgggactctaaaccatcgaatcgagcgagcctatttcccgtctcctgctttcatagagatcttttcttctctgaccgccggccctgggaagtaggttaatccacaaaagcactagcagtgccagtagttggtacgtggatatcatcaggatgctgcttgactagctctttatccatgatcttcactgccatctttctagcacaatcacctttctggctggaagctgtacctatatcatgatcgggcacgcaaggttcttctttcatattgttacaaatgaactcgtaggctcttcctgcatccatgcataaagaattagtcagtagggtcctcgaagcccgccaaaggggtaagtagagtgattcctcttgtaggggatcgtagctagctatagtatcacacgattctttcatcttcttttcacattcattctaattatagttggaaaattggctactttataaggctaagcaaaggttttcaatccaaagctttgaagaaagaagaaactccgggtggaaggttcaaggattattctgattgcacgagagattgccctaccagctaactcctattgaccttactaaaacaaaagcactaagacttatactagctaacacagaagagacaccataggaaagggcacacctaaccattttttttttcacaaggttaccctcaccactgtcactttgatcaataccttgctttactgtaaaagatccttacacaaagtttcttcctagaagacactgtgcctgaacttatgacacatacctacttccatcaaccacatcttgctatctttcacacgagggtgagttcttgcgggctgacgttgtgaacaaagcaaagacagctgggtctgtgagtgagcctagactctctctattcgagtgagttccacttttcttgaagtgtaatacccttactgccagttccctcttcccggatctaagggttagctttctaattcatagatagcccgagaggaagtctaaggtttcagcttcaagtggacagctttcttcctaaacatccgagttcgaagcgaaggcccttctctgctgattcgtcctaagataaggaagagcttaacccacacccaaagcaaattcacttcctcttcccttcctcaccttcaagacaagcaccacttttcctatctttatcctgcagtttcaccacaggagcactgcgtctttccttcctatcttgatgaatctactttttaccggttgctgaggaagtgagatacgtagccagatcaaatcaatttccaagggggtattagtttcaaactaaagggattccttcgatacccgatcaaccaaggtcttttaccagctttttgagtagtattctactttaccttaccctcacgccttccctttttctaaagtaggaatggattatcctgtggtgttgctatctgatgcttcagattcattgaattccctcccctcaacttattctgatttcgaggccccctataagataagactttgctatctcttcctccttgtaggttcaagcgcaaggctaacaatgcctatcttggaaatgctctaaaccgtagaatcacaacagcctttctcttagggcaacaggggaacaaggaaccagggaaagaaccaacacaactttctttacttcctaggcgactctacttctttcttcagtttcttttagaagggaagaaatgagatcgatagcgggaggtgcacaaaggaagtgagcgagccatcttctccaatccaataagaaaggagctaatcatctcttgtcttcggtaggtcgtcgcatataacaagaagaagggattggtgggatcttgagttcatgtctgcagtcttgaagttgataccatatccaacgagaaagaatatgaaagaatatgagacatgaggctagagccaagaagcttctccgtggatgacagctaaattgaagctctccagaaaaaagaagaagaaaggtcgattcacactacatcgggctacgtcacaatagttaggaattgaatgcgctgtgaaagaatcttcctccatcaatttggacagatgatctgatattcattttcaaactaatgccactaatgacccaaggaaaggaagaactgaacttcaagctagggaaggaaagctagtaactgatacgcaaaactaacaggcaagcaaagcacaaaaggcaccccgacggcctcatcaatcgaggaaggaagcatgaaaatcgttgaaaaagccttcttgctattgagcgggctttcataggcctttggtttgggatatttgattgaatcagagaataggttcttacagtgcccggaattggacaaatgaatgaagatggcatgaagccgatagctgcttatccggatccgggctttctttttcttaaggcgggaaggaaaggcaaaggcaagtaaatgttcacaaaggaaagttcctcttttagtcgagtcatttcatacctttttctaataagaaggctaagcttcatagctccaacctatacaagacaaggggcgcttactaagcgcagcttctatcccggccaagctaacaaagcgggggacctaggtgggaattgtgaaagaaagagaaggggaagacgctgggtagaggaagaaaactcatcaggctcatgacctgaagactgcaggttcgaatcctgtccccgcctaagaaagagtgattgaagagttaggtaacagaaaaaagatcgaaaagtcccggatcatcgtctacacttttccgtatggaagtggtggtcttcttttagactcccccgagaagatggatcctctcttatccgatccgtattgctccttagcagagatcgggttattggtcttgttctgcacaacctctcctggtgacccggcaaggtaagcaagtgaacctctctctagtggcggcatctaagctatcaaatgactctattccactcccttctgagcccacatctccatgtcctatcaatgctgatctctcccgctgttgaatcgtatttgattttttagattgagaaatctccaaacccttatgaatggatcttgctccggtcgataaaatatcttcaaactcaaaagatttataccacagcctatgcttactctgcctatctaacagcggggtgaactgcaaatactaaatatgcaataggcgcaggtatccgaaactggaattgaccctcgtactggctcccgaataggtggaccctcgaacgggatatgctccgacttggtatcaatctttctcagctgatggctaagcatatgggactccatatgagaaactgaaagttaatctgctctttccgctacgagctcaaagtaaagtggttcttgaatgaaaactcattttggatagctgacttgatcaaattgcaagtaaagattccagcggagatgaagaccctcagacacctattctgaggatgaaggaaacagtccaagagagagatggagtcatctggttggaacacgacttgagagacgtttcttgattatagggaaaaagactatgtaaagactaggaagcgctggaataacacttcagacaggttctcgatagttgacgactatttacttacgacataaagctgtccttccaaccagccaacccatattacttatagaaaggttgaacacaacacttacttaggcctgtggttcttcgactgtttcaggagctgtagaaagggatgctttagctgttgaggctaagaagggaattgaggtaaggctggcattagagaatggagttactgagcttactgagctaatggcctagaagtaagtggagttaagacagctcgtagcagtatcggaatataatagaatcccttctttacttacctataaagagtgaccactgaacgataagaacaaagccactttcagctataaccggagtgaaatgagttctataggccttagccggaacactttctaactaactgttagccagtgaagtgattgctgggagtgatcacgaacaaaggattaatagaggcgtagtctatagccgagctgtaacaggagttcgagtttgagtgactccaagaactacagggaatgccatagtatagctaaagccaatagccgtagcagtgaaagctgtcgttcctgtcatttcactactattccttttctttgtccggatggtaataagttgtgatataacccctactgtggtggatccattgttaggagtcacccctgttccagcacgaagtacggtagccggctcagtctcataacatcttccgagtttggatacctataaaaaggaggataaccgtttgattgcattaagattatgtatactgctatccttcctcaacatctctttgggaacatcttctttccttcgactaggtcatccctacgaggaacatatctatctcctaccccgccgagtaggttaacaaaccctagtaggatctgcttctaatgcatgcttcgcgagttctacggctgtccataccctatccacccttaccctctcctctaatctatttctttctatctgttgattattgctgcgattctgctgttgtagataaaataagaagttgttagccttcattcgggacaagcttcaatcccgccttaatggttggtttgcaaaattttgatctcaggggggaaaggaggtgctgctgaaatctatagcaatggccttaccggtgtatgcgatgtcgtgcttccggctttcaaagctgctatgcaagaagttaacaagtgcgatgacggaattttggtggagttcttgcgaaaacaaaaggaagatctcatgggtagcttggcagaaattatgcaaatctaaagaagatgatggtggtttgggttttcgggatttaggttggtttaaccaagctcttcttgcaaaacaatctttccggattatacaccaaccacatacgctactatctcgacttctccgtagccgatatttcccacatagctcaatgatggagtgtagtgttgggacaagaccttcatatgcttggagaagtatcattcatggcagagaactcctctctcgcgggctcctaaggacgattggagacggtatacacacgaaggtttggttagacagatggataatggatgagacacctctacctccactgaattgaaacctatctattgaccttaatcttcgtctgacttgtacgacatgaataggcagtcgtggaaactggatatgttgcataatatttttcctccacagaatgtggcatttatcatctcgatgataccaggggcaaatcttatggatgataatgtgtgggcttacactaagagtggcatgtacacggtacagagcggttatagattgctatcacaacaagcgaggaatcctgaggaaatcgcaggaatggaggaaactgttgcgaatgagctaaagaagaagatatggaaagactgaccgcaagatatttttctccacgatgatcccacttcgattgtgttaagcaaagcacaatcaaagaaaagaagagaagttctcccaaatagttagataggatctttcccaccggagaccggcttcgcgagcccatataggactactcttggctaagcaactttgggcggtggtttatcctatttctcacttgaatgaggaaactttcttataaacatattttgatgtgaggatcaactactcctactcggtaactgctatccttccctctcatctctctcttctccgtcaagccttaaagtacttccaaattcctcacctaagagtttcaatacgctctctttctttatctcctctcttctcattttaggtacaatcatcgttgacccaagtgtcagcgccctacagcgcgcgtattggaccactgaaagggttgatcggttaggtttaattggacattggactagagagagagaagagaacaaagtgtggccttcccccattctcagagacagatggagtcaatttattcccacacatgcgcaaaggagagagaatgctagcaacttcgaaagaatgggaaaggccccggcccgttgaagcaagttgtagtgaaggagttctgaaggttcttaaaggatgcagaacaatactgaaagggaacagacatgattcactttacattcttcaaggctctgttgaaacaggagagtctaaccttgcagaaacagctaaggatgagacaaggctttggcacagtaggcttgcacatatgagccaaagaggaatggagttactggtcaagaaaggtttcctagatagcagcaaggtttcaagtctcaaattttgtgaagattgcatctatggaaagacacatagagtgaatttctctacgggccagcacactactaagaatcctctggattatgtgcattcagatttatggggagcaccttcagtcccattatctttttgaaagtgtcagtattttctaagtcttatagatgacctaacacggaagacctaacaaatactaacaaccggattgagtgcacttgatgctacaattgtaacacctttcccctggtccgtactgatattagatttcttacttctgttccgattaaatgggagatgtctggttgaagaatctttccttgctaaccaagagatgaactccgcacaccgatagtcctatgagcgttgtgccaaacctttcctacctcctttgggagttcacttcagattccaaacagctacagaagaagaactgcaggaacaaatggactatatgaaatcactcccatattcaagtgctgttggaagtgtgatgtacgcaatgattggtacaagaccagattacccttatccagtaggagtgattagcagatatatgagtaagccattgaggagtcattggcaggctgtgaaatgggtcttaagatacatcaagggaacacacacaagatgtgaagttaaccttcaagaagagtgatgagtttgtaattgattaaaggctactgaaatcccataggcctctgatcctaatactgaatacctttcgtagatcaaggaatggacaaagcgagaggacgaaaaaagcgaaatattacaggggcttgggatgcctcaccaggatgagccggtagcacttggcgtgagtgcgctaataaaccaacccatttgataatcaaagttccctatcgaatgtacgctttaggttaagtgaagggatagaccgaaccagctcactaacgaaatttcagatcagggaatcttacccgaagcatatctcgttagatggttagatggatgtcgttgacgcgaagagagcttttatggcactttcacaaagcggaatactatcagtagtatataccttccctaggaaaagcggtagaacatcctgatctcaaaggcgttcctctcctcttgtcccgaaacgttagacgagcgactatgcttaaacgggtatgttgctttgccatgggtttctttcagctgctcttttggggaggacaagtagtttgactttagtactcaatttgagacttaataggctacttggcggtagtaagcccaggtccatcattggctggtagtcttcaccggcatctcctctggaatgaatatatcaaccattcagaagaatctcttttcttctgtgaaggtgagagaaggactggccttaacaacgaatttcgtaaagcgcaagaaggggcttggaaaaagcattcgaaggaactcggacatcgcgcggccatcggtcaagatctcccctgatggacatcattacacattcattcaacgcttccccggcggggtaagaaagtaagattgaactactgaataagagaagcattgtgatttccttgatttaaggactttagcgtctcattgcggaagcagaagttctttcattcctcattcacttctaggacttgggttagagaggggggaatatagtaaataaataaatcaagtcgaagtgcagttcctatttctcagctcagattagagcaccagctgttacgctgacaacccccgttacgccgcgcttgaactcctagccctaagacggagtagtcttagtagcagtaggattaccggattccgctttatgtctttctttcttactttccctaagcactcattgtatttgaatttgacccgctcagaagagctatgtatccggtcttgggagtcaaataagggcatggcttaaaccagctccctagcctagggtgaggtctcataatagagtaaagtaggacagaaggattagcttagcagtgaacaaaaatcattcaatcagctcaagagctggaaaaaaaaacttctaggtttcggaatagaaggaagggggctcccagcaggtaagtcctgcttgattgctttcaccaggtttataaagactggttcgaaaggaccaggtcgggataggctgggagtcgattagcccgagttgtgttaagataagtggcacttgaatttgaagtagacatcggccaggtcttggatgctgaattatcggtcttaccacttgtatcgatagacccacttgaattgaatgctgaggagatttattttcaatccaatcctgatcctgatcttcgaactttctctctgcaaaaggcttctggcaaagcttgaacatcgtatcgttagctccttttaaaaaggaagacagaagagctggtaggacggactggtaagggatgaaattacttattacttatgagtggagggcttcgcttttttctataactgtcactggaacagaaggcctagtactccaattggcttaagtgcactcccaatgatattctagtcttctttcttaagaaaatatagatattatcgtggaaagaaatctatctcttgaagggagtccaacttaattcagtttgatcccaagagacggtatggaacgctcgtatagaaccccatccaatagaactaaaaccgctgggaatgcaacgggatggatgtcaactggtaagaatagccttggtctggagatctttacaacaggagatcaggagttagctcgcttggacggagagcacgagaaagaaggggcagtctaactgaactccactcgtttagaagaagcctcgccagttagggggatagggaaaatttcttcacagcatgaagaaaagagagggattcaaaaagggctggctccttagaagggatttgagtgctttagactaagaagtgagattagataggcttgtcttaggatttgatgcacattcaagggcaactactgcttatgggtaggcacctagtgctacaatggctgtaacagattcagagattgcatttgcccttggatacacaccacacattgattggatttgaaagatacgaagggtccataacggacaggaactacaactattgatactcggtctagactagggggggggaaggcactgccggaaacgggactgctgtactataaaggggttaccgtcgaaggtaaggacagagactgattaaatggggaggacagatataggcagacacttccaaaaggcagaagcattggcttttaggacgcactcaaacttccattaaaactccaggtggcaaaacaactccatccaataagaaagaggaatgtgctaacgccaataagcgtataagaaaaggactagaactggctgaaagcacttaccactagaaagaaattggcctgacagaaaaagtcaaatccctctccctctcctttcagtcgagttccctcttttataagagtaataaattaccttggacctctcctttcagtcgagtttgtgttcacaacctctcctttcagtcgagtttgtgttcacaacctctcctttcagtcgagtttgtgttcataacctctcctttcagtcgagttgctaaagcacctctcctgctttctaaagctaaagggcgagtgacttcatacctttcctcaaagccgcctaccgtgcaacgagcaacgacctggcctgggacgaagtaaacccttaccagggttgagaagcttactattactaagccttttgccctcccagattcagtcagtaatggcttctatgatagagtaatttagctatagagttttcagctaaatagctctttcgaatacttccgttcgtgcttacctttgtatctatatcttccctcccaatgaaaacgaggagaagaggtcacgtctcagcccaggagaaagagaactactcgactaagaagtcagtgttggaggtgtactaatccctctcttctagccggaaagactttctaaccaattccattaataagctaaagagaagttacagaagtacggaagtgacagagaagtaaaccttcttagccaagggcagcgcagcgcctctgatactgaactagatgccgcaaaagcaccaactctggcatcatatcccgaagatagtcatttcagtctgttgggcagcgttttatagaagtgacggaagccaaccgactgacttgcagctgccagtgtccgcctgactttcttctcttttactatagatgggagtctatattcagcatctaggttactacactgaaagcctaatagtaggtctgcaagcctaattcggattctttttctaacgtcctacctacaggcgcataggagctagttttccaaccgcggaacaatatcttacacttagattccaccatagtgctagattaactaggccttctctccactaaacagattccatcgtagtggatagaagtctttagactaagggcagaccgcaagggcaaatcttaggcattggttccgaggacggtagcctactgagaatgaaggaagagaagcgattttgaagactttctaagatatttccacgatcaataccgacttccttatcttttctcttggaagtcgaacctttatctgtatggaaaagagggcttctacctatacttggttgagaaagggctgaatggtccaggacaagaaaaagccactaaaaagaactgtaggtcatacagggtagtccactttatctttatccgtgactctgagtacaagatttccgggatcaagaaagtcgcaaataaatatgctgggctggactcttttctcgtatgcccggaaaacgttgtttcgatagaactcagcttgctgcatagctcgtctaaacaaaacactccagatccgcacttccctttaaatatactccaaagggactaagcttgactaagaagggctttgctccgcatgagacaaagttatcaaaaagtacttattccaatttagataaccctgattagaaacacacttgaccgttttctagcttgaaccagaacaaacattaaacgcccggaacaactgttagaatttcgatcgaacaagtattggcattctgtcagcatttcccccgcggtcagtgatagttaggaaaggaagaaagaaagggtgatacacgagaagataggtcaggtatatatagcgattgcagatggtgcaccagtttcgtatacataggccctggttggtaaggtgatgagatcgacacattatatgcgatctacgttcataggttctaccttgaagctcttctcctttccttactctaacaagtaagcaaataggaattaccttgtgaagcaacgtaaatttagtgagttttgggaggttagccttaacacatccaaatcttacgaagtcaatgcggtagcagccactgtcccgaccttttctgtcactccttcctttgaaaggagcttctcgccgttaaactcagctctttttccggctttaccgattagatcagtttagaccttaccttgggattggtttttttcctttaaggctgacccttcttatagaaaactggcatctagaaaactggcatccaaaggtcctcaaccagggataaatcgacaaatctaggataaagtccacttgaatcgaccaaaggggaaggaagtatgaaaatccaattctttgacggaaactaaaggctaacctacaagctagcctcgtcgaatcgactcactctcctaacctcaaagggaatctgagaaacaagtagatcaaggattcccatgttgcctatggtgtcttgcgaattcctaggaatgttaggaatgggagaaccagtaatcccagtaatcccaggaataggaggtaaggagattagttggttaggagggaatcccagcaatattagcaatgaggtgatgagattaggtttgttttggttagggattagaggaatgggagaggtaagccaagtaaggtaaggagtttttgtttgtagaaagttccatttcaatctgcctatctgtttgaatcagtttatcccaaggaagtgttttactctttaaattggtagttggttaaggaatcccaggttaggaaattagattagttggttctggaatccctggaatgttagcaatgggaagagttcaccttgctctctctccttttagtcgagtaataaatccctctcgcagaaagctcaagtatgtaaacaacctctccttttagtcgagttactaaagtacctctcgcaacaagtactcgagtcacaaaactaaaggtcgagtcatgacttcgccctcaggtgggaggagaaactgtacaggacatagctttccgcctctttctttcacaaaaaaatgaactaccaaaaactgtagatttattttttgaaaagagttttgtggccttttcaaaaaataaagaagtgctactcaaaatgtggcggagctagatccttacggatcgtggattcagagtggcgctcgctttattaaaaccggaaagactttatcgtagaagcgggacttagaaaagtcctaaaatatctttctgaccatggtgtcaatagcccatactttcagtctttttttaaaaagacaacgtgaagaggaatagatcaacaaaacaaagaaaggacaggaacaggggttgttgcagaattgggttcgagtcccagggacgcaatgtggctgcttaaaaaactgattcaacgagatatagatttgtccccattaagatttcaaacttgtcgtctactttcaggaaatgttcggaacagagaactgacaataatacaacgccgcattctccgaagattgaggaacaggaagagatctattaagaagagaaagatttatccgaaaaaatatcttaccagttatatacaattacaaactacacgaaagttgcccctttttcatggggatttacccatcacagagatgcacagaggaacaaaacgaacttcatatatcccttttccactcaatccagaaacaagatttgacgttattccgcttcgtctccattttcttgaaactattcctcaagcaaggcagccgataagtcatcgaagggtttgtgtgaataaaggaatggtaagcattactcattttaaactttcccacggtgatataatatcttttcaagaaaataacgcgataatacgcggtgaagaaataaggagatctttctataaagaaatttcagttgaaaaaatcataggcaaattactgcatcaaccgctaagaatgtggagaagaagcaaaactgaatggttccacctactcaaaactaagaggggatgccgcctactactaaaatcccggtttttgcaacagttgcgttcttctatgcaagaagaagacttagaaagaacaaagaagtttggatccgaaaaagtatgcttaggaagttccttcgctgagcacaagagaatgaagaggaatttgttaaaatccctattcttatcgaagagaaggaaggataaaaacctaaatcttcctactcgaacaatcagtcctatagtttacaactcttctttatctttatatagtaattcgacctattgcttcgcatccccccataagttgactatgaagagaagaatcaaaaggatcgaactacctactcattattcggaggttaatcatagaacaccaaaagctgtggtatcttatggacctaacataggtcatatccctcacgacataagattaaaagatccaaaccttcctcttcggagcagaaacggacgtggccaaaacatataaagatcggcgtagtcactcatagggacatctctatccggatagaggatagtctagatcgattcatagatggattttttcatctagataggtatcccgtggatagagagaaagatagggatccatctagatcttgattcactatttccatttttttttacttagtcttattaattgggtggggttcggggagcatgcccggcataatcaaggccgtcgccccttcttcgacggggatgggcggataaattcgggttcctagtccgggtgggtggtccagttgaagtcagaaagtccgctagagaacaaaagatgtaatgaaaagataagcaatagaagtggccaggtcacccggcctagaaaactcgcttagacaaagactcaatcaatttttcggaaaggaggggtagtaggagtcaagatattgcgtataaatatatatacgagagagagtctcttgagcggccgagaatcttatgtcaaaaggaccaaggacgatcttttcggaaaggaggagtaagtcttcaaagaagatcgaggaataaatcggacaattatgctattccgccctttcttttctacatttttttattgagccgaatcactatcattatattatatattcattgttggtttggctgctggtctagcgatccttcctagccgtcgcctagagtgcagcctgcccgctgaagaccgtaacgtaagtgactcagtgctccatacgggggaaatgaaagcagaattcgttcggatcctcccacacatgttcaatctttttttagcggtttccccagagatctttatcattaatgcaacctccattttgctcattcatggagttgtatttagtacctctaagaaatatgattatccgccgttagccagtaatgtgggttggcttggattacttagtgttgcgcgcctaggagggcagcgcgcttggggatgcagaggaactattatcgcccagccccctaccctaacctaatgcggcgccggattcggaccgcagggaaccgtagcatgggggggggacgtctaatccttttgccgccgcaaggctggctaatcgtacgcagcaggctcgaagaccccctggttctggaaggcacatgagtccgaacgctatgttgaatgtgcgaccgacactacgtaggtaccagtgcaggtgaggcgtcggtcggtcctagaaacggcggcaacggcgcgaggagttaacgaccggacgtgctgcaacctagggatcaccaggcagctctttcgctctatagggatcggggggggcatagcacaattcctcttggaggggggttggtttgcccgggtgactgatcctgccataatgtactcctacctatagcaccggcaaccgaagtaaagcatacataggacgatcttcatgcgtgaatagccgggaggaaagaaagggcggtagatgataatgaaaaagggcgccgcgtctgtacgggcgggcggaatggatgagcaaaaggtgccatggggtgaggaatatcccgagtctcatgtaagacaactaaatgcaccccgaggtgctgccgaggaactgggagaccttctcgagcacaggataggcaattgaaagatagagctagcctattcgttatggggaatcaatgctccgggccgaataaagcttacctccggcacctggctttccccggcgcatattagcttagctgtgcttaataggtcggtttgtttggcttcctctcttagcccattcctaaccagtggagaaaaggttcgcttatgctggagggttttttccacttagtgatcggtctgctagttcacgcaaatccgaagaagttatcacggacgagccacatgcagggaaacttgcacgtgtggttctggccgggctttcctgaggtatctaataaccttgcttctgctcgccgctggcgcacctctcctaactattgcccatttattctggaataatctttttaggagggacaattttacatatttctgccaaatctttctattattaagtacggctggtaccatttcgatgtgtttcgattcttccgaccaagagaggtttgatgcttttgaattcattgtattaattccacttcctactcgcggtatgctctttatgatctcggctcatgatttaattgccatgtatttagctattgagcctcaaagtttatgtttttatgtaatcgcagcatcaaaaagaaagtctgaattttccacggaagccggctcgaaatatttgatcttaggtgcattttcctctggaatattattgtttgggtacgaccggacaactaccgatatcaattaatatctttttttagaatgttgttgttaaatagataaatatctatttatattgtaaactatcggatcgggtattacttagatgtgaaactttaagacctcattagttgtgatattgatcttacgggggggggaacgaaatcaaagaatatatagacttgtaaagaccctctatgtagttgtctatctagggcgatcgatctacatctttctccatagcccttgggctgtgtctcgatctcctacgcgcgaaatcagagggacctgtttctatggagattccccttggtctaattccacgccttatgacgaaaggagagtcggcgtggcatcaagtgaagatttagggaagtagagataaattcccttctggggtattccgaaggtgtaacctaggcaacgaaaaggggcccgatacttcaactagaggagcgaccagttggttcaccaaacccctacccagcgtcacacgttctccaggtccgaagggatccagtgcccaactaccgactcctcccggaatttcgttatcggagccgagccgggaacggccgttagtggacacccactacttttcaccggttagagaggtcctctttaatacattaagaaaagatgttcacaggggccagaaagactcggtcataggaacttagaccacctacgcgctggtaaacgaaaaccacctcgaccggatcagagtgaaacaacaatgtcgaaatcaggccgccccttgccttgaaagaattcacacgcggccacctgctttcccaaaagaaggggagatccgttgcttactgctcacggttttttcgacctatactatagtaaagtcgtccgcctatctttcttctttctttttcttctattcacatcagattttagactttcaccaattaaaggtgaaaagggggaaagaagagagctttgggattcgctcacttcttaatttggagttatcgagattctcaatgtggggaggaatagtgcgggaatggcggttctcagacaagggaatcgttcctctaaaattggctagaatgtttcctatcaatagagctttcacagcaggaccagtgtaaacaggttctaggtcaagcgatcctataggcaagttttaaagtcgttacccccgaaatgaaatagtattccacataaattgttagttattctcctgcattagatattttctagcaatcttaaggttaaggcgagcaatctgtaggtattcctccgctgccctttatagcagggattccagtcgaggcttcccctttcgaatgattcagtgctctcttcaaccggcgagtttagccttgtcagtgctctcagaaaccagatcaattaggtctggatcggctcactttcccaatcgaaatgaattcaaaacgcgagacacgacactcgcaacacgagaatcaaatcgaggatcaaccccctcctatatcatttaagctgttacagagggcgttagctcaattcatagccttccttcgggtagggttaaggcaagatgaacaatgcggctaagcgtgcagattgttggtttggcgcgaagaactatggtagagcagtttatgaatgtctacgtggtggactttattttaccaaagatgatgagaatgtgaactcccaaccatttatgcgttggagagaccgtttcttattttgtgccgaagctgtttataaagcacaggctgaaacaggtggaatcaaagggcattatttgaatgctactccgggtacatgcgaagaaatgatcaaaagagctgtatttgccagagaattgggagttcctatcgtaatgcatgactacttaacagggggattcaccgcaaatactagtttggctcattcgagataatggcctacttcttcacatccaccgtgcaatgcatgctgttattgatagacagaagaatcatggtttgcacttccgtgtactagctaaagctttacgtctatctggtggagatcatattcacgcgggtacagtagtaggtaaacttgaaggagacagagagtcaactttgggctttgttgatttactgcgcgatgattatgttgaaaaagattgaagccgcggtatctttttcactcaagattggatctcgctaccataccacaaggctatctgagttcacaggtttagttgcatgtacctttttttgaatcgatatttttgtggtgttcagtctaccgctctgtgggtacaagatcgaaaagaatgcattaaatggatgcattgagattccgtaagtaactcagtgagtgctttctaagaaagaagggcttggaagaagaaaatgaaataggaacaaccgcgctggtcgtaatagatcgactttcatgctgaagcaagaactagcatgaaagttccatttcagggaaggacgacggtaccatgatactttctgttttgtcgagccctgctttggtctctggtttgatggttgcacgtgctaaaaatccggtacattccgttttgtttcccatcccagtctttcgcgacacttcaggtttacttcttttgttaggtctcgacttcttcgctatgatcttcccagtagttcatataggagctatagccgtttcattccttttcgttgttatgatgttccatattcaaatagcggagattcacgaagaagtattgcgctatttaccagtgagtgggattattggactgatcttttggtgggaaatgtttttcattttagataatgaaagcattccattactaccaacccaaagaaatacgacctctcttagatatacggtttatgccggaaaggtacgaagttggactaatttggaaacattgggcaatttactttatacctactattctgtctggtttttggttcctagtcttattttattagtagccatgattggggctatagtactgactatgcataggactactaaggtgaaaagacaggatgtattccgacgaaatgctattgattttaggaggactataatgaggaggacgactgacccactcacgatctactaaagggcaagtagcttgattggttcgaatccaattcgtgagcagatgagaaattgttgcaccgtggactctgattcagtagcggcagcaaatccttctctattctacgatctgatcttgtctgttgaaaatcgtccgatcttaaatttccgttctcccttacaactccttctgggtgtctactagtgtcctaggcaccttaatagcttattcaaacaaaagaaatgaattgatagaggaagatgaatgtgcaattccatttcaatttaatggttgtactgctactgcttcctttagcagctccggtatcggcatcggcaacattcccagttgagctgattctatcactctcacttgcagcctagtctgtaacaagaaccatggcattcgatgcttcctgtactgctcctgtctagcagatcgtagcgtgtctactattgctagtgatttaaccccttcctcatataaagtaagaagtgccacagcttcctttcctaattccaatcgtgacattggtaatcccgcatctgagatgagtaagactaggaattttcactaagccaaatctctttcaagcgcactaattatatcctatccattcaaggggctattgcgcttagggaagaaagacggaaaagctgtagtacgcttgagtgagttcgcttgatctttgctaattggctgacattgttattgctgtataccggtatagagtatatctgtatatttaattttcatactttttttattttagtaagatcttatatcatctgttccaagagcgatggaatcccttaaaaaagggagcccgagcggcattaagaatagcttctaaaaggagaactggctaacgaagcctagctcgtttaggtcctgccattcctacctatctatcattggtcaactcgggaatcagctagacccgactttctctttcaaatgaattgattcgccagtttatgagctcactaagcctacagccaacgctatatctcttgctatggctcttagctcagggtgggggtatctggtcagcacactaagaatgaagtagtacgatcggcgggcgtttgaaagagagcttcagtacaattctcgctgcttagcgaaatgaggtacaaagcacctttccgctctttgctttgcgtatgctggtttggaatctttctcttggtatgaggtttgaaaccccgcaatcaagggaccaagctgctacctttccaggagcaactccttagccagcctacctataatccctaccataagctacttctcctggagtggaactctaagctttccctctcgcaataaatgctcgagttccctcttttataagagtaataaattaccttggacctctcctttcagtcgagctagttctttcttccccgctataagctaacaactgtgttcttactttccacttactttcctgcagtcccatcttattagacaaagggaacagaagaaagaaatagatatctttcaatgtggggaatacttaccttagctgtctttactttccttgtttaaaaggcatccaatccaatgtttcataactatttgtttatggggaatcgattgttagttagctgtccaattgaaagcagtccccatgcctttaaccaaccggcaccagcaattcaatttaaaaatactgctcctattatcagtctcagttgcagttgaggcttcgtagaagggccggatatacctctccagcaggagatttcttcccgagtcactcttcttccaggcttaaggggcagccaggacatcagaagtaaattcaagacttaacaggatcggtatatggttttgcatcaaaggcaattcgcggtgaaaaaagtagtccttcctcccagagctgaaatagccgggcttattccttcaacagaggtaatgatgacccgaagtcttagtgtggctgacaagggggcttacaagaatgaactgttgaactagctcgcgcggaaaagatatatctgttagtaactaagaaagtgctaatctcgcagcgcagagtcaactgttaagaagcggcggagagaggtgtaaatcagcaagccttccaacaaaggatttcgcagtggagattaggtgataggcctgcgttggcacataaaataatttccaacccgaccattcaaggaaatagacaagatttaagctccttgcttgggttcggttatcattaaatgtataggctggggtattgaagtgaagatacttgcataaatagaaacttcgggcggtagaagagaggccctttctgatacgtcaaaaaaagaagccgattctacgccgtaaaggaagcatgtgcccaatcactaaccaggaggtggtgttcatcaagccttctctccggacttaacctagacctttgtccggcctaaaaaacctttctatctaagctatagttccacggcccctcacttagagagcaccccaatcccatgtgcatctcgatattctatccagcaaggggcggtgccagttactttttttccaccattcactcactccacactttctagatatatcggtctattcaactaccctctttcattggcgaagtcggaataaagaaatattattcaattcaagtagagccttttcaaaaaggtttgacacagagatgcgggcttcctaagataggattgagtaggcctggtagaagtatattttccaatgggccgcctgaagtaatccgagtacgcaagttgggtctcagtgactatgctagaacgaccggtggcatagtcaggctttagccgaggtgcctatttcttattcaataactgataggctgtataagaaaatagggttgaggaggggatgcacctatcgatcctggaaatgccaggggcttgaggaaagatgccatgcttgagtcagcggaaatggttggtgacgaagaaaatcataggtagcttgcaagcagaggaattaattactttatatcctttcactttgaaagcactattatgactaagcaaattctttcattccccctacgcctctgtaccctattcctagcctagcctcttaccccgaaatgtgagaatgagctcaagtagccttcgtccacatctccctagaaaggggagtcgagttagaccgcttagtaggaccttcaggcttatccacgctagagatggacgttcccacataaaggaatgcttcaattcactcgggtataaaagaaatcaattctgacgaaagatagctattcttctctagaaaaggatggttagaagttcaccgggcgaagtggtggagtaattaaaatttccaagcatctagggagaaatctacttttcttttagaataggactttccttacttaagtgaaagcgcaagttagatcctaactgggggggaccctataaggtagtagaagcaagccgagctgggagctactgcctggaggctgtcaatggcagttctgtccctcgcatgtggcatgttagtaacttacgccgcttttacttatgaatttctgtgtcgagttttatggtgacgtaggcaatcttatgctcttgtttatcaattttaattttagccatgttcacttagtttattatgctatctgaatctatatgtactattgagctttgctcgtgcagaaatgatcgatgaaatgagccccgctccctaacctaacgcggcaccgcgcgtttccaatagtcatcctaaatgaggtacctcatctcatcgacgaggctcagcgtgtactggcaagttatcaatccgtaagtccacaagaccttttcttgtgtttatagaagcagctgcccctggaatccactttatattcagatcacgatctatagacctctgaactcatgcgcttgaaccgccctttcgaggacgattggtgacctgttcgattaccagctcggaatcaacccgctaacggaatcctctggctgggttacctaacctccacttactcctaccctaagacaccaaaagattcaccagggtttatttcaactagggctctttacacgtcagtttggtttgagcctacagctgtctcaacttaatgaactcgaccttatctatacgcaattcatgccctatcatgatgagtcaacaatcccaatcccaagccaagctttctcaccctatttagatttaagtgcaccgcctgctttctttcatgttggaatttctcctgctgtaatatatagagtagttccccttattctagttgtcttctttctattccttccggagaagaagggtaaaagctagaaaggtaagcattgtcgtgtcgacgcacgcgaaaaaggtacaagtccacttcgatagccaagcaatgagggagtctgaagagacttccagttcgctggacttagttttagatactccaagccttgttatcttaattctcttctgtaacagtaacggatttcgatattgaatgtactggtcggttgggaccctataagaagacaagccaagcgcttagcttagttcgcggccctttacaagagtgaataccgaaacagacaattccagatgccactaaacaagtaaaggacaacagacagtattcgtggatcgggaagacctactctcattcaaggaagcggaccggttgacgactgcaggctagggtcccgttgaatttgacctggtaaatcccgccacagaggtcgttttctaccgggaaggcatagagtcgcattttagtctgagtctgagcaaacaaacactcacttaatcgaaagctaaataattaactttggaatggtaacgaagatcgaagatcgaaatccttccttccatcgtctgatctcctcctgagacttctgagcctcctaggatacttcgtaagccgcagccacaggattaatatgtggaaatggcaagtacacactgtgcaccacgatctttacgttgcggatgacgtccgacaccttaatcctcacatagttaatcctcatcggcgccgaggtcaaacctccaccggcaccagaggttgtgataagcagcggttggcctcgttccaatgtcggcggagcagtccccaccgaatgatcatttatttgactttgactcttcaaatcccattttttattttttctattgtttgtttgttctttatgcggggacaggattcgaacctgtaatcttcaggtcatgagcctgatgagttgaccaattcctctaccccgcttcttctcttctacaagtaggcttctttcttctagagacaaacgaccgattgaactacaatcacaggagacaaattattcttcttgtcaaccttcttctcttacgatatttcaaaagaaagaagaagagtcgttggaccaacaaccgccaggataaaagtcttctttagtcatcaggaagctgatttgaatgaaaagtaaacatagaattaggtctcacctgcgctagggactttcattgaatcaatctcggtatgtcaatcggaagctcaagaagagatagtatcttcctttcagtagcctctggtcttgcagttgggtttccccgcccaaagccttctaatgattccgttaaggcaaatatcccataataagatatacgaataagacggatcagaccgaactgtcaatgcattcattccatctccaccggaatcacccctatgcatagctccttccctcttctatgaagttgaagtgaagcaagcgagcctctcgattgagggagaccgatctgagtcagtttatccagtattttaggaaatgttcgggatagattcacgttttcccggtcttttttatataaattagcgcttttgtggtacgggtggagggctatgagctcgttcactcaatcccgtggaaacaactcccttagccttagttggaagctaaaccaaagtgaagcttgtaggctcgtagagaaagctattttgcaggtatacccatagatccatgttcctgaacagtctcggagaaggccaccagcacccgacttaccagaatgtcccgttgcagcaccatgcaagaaaaggttcctcttggaagcaccatccgtattgaattttaaccagccaatggaaggaaattcccaaaactcaagaacctgagcttataagaccaaaacaacttggacctgccgaatagactagaagacgatatcatagttctgaatggcgcgcactacctgatgatagggagtgctctgtcgcgttccattcgtttcgatttcatttcaatatagggcaagtcctttttccgacagaaggagtggtcgttttgggtgacagaataagattccccggatctccctcaatctcaaatcgacgacgagagattctaccacgctcacttttacgtagcttcacttcttcttgatcctgctccattggagttggttcattcagtgtgtcgctcccacttgccccaggaggctgagtaccttcgttcctcttcctcaactggttgattaggtgctccaagatctggatcttctatttcataaaactggaagtcttgactcgcccttctcggtggtcgttagcagctgctatttgaaatccattcccgctgctgtcgtcaacggtagaactcttcgggcatccgtccgttcttgcttctggagttcaggagtggattcgattcgatccgatgagagagatcagtaggggtcatccccgagtggacgagcataaagagatcccccggatgacaggcctggggcgaaaactcttcaaaagttctggcgctttcaaccctcgaacgaaaatttgattgatgaaatagtggatttcgcctttttttgggggctatttcgtgcctctcaattctgaaacaacaaagcaggggaagtgtggaaacaaagttaaagaagagacttttaggaacaacagcaccaaagataccttcggggtagacatggcaggcggttagcttatagggctaacttcgccgggaacttgttcaagagcctcatcgactggcctcttatcagcatgacaaggaactcgtaaagccatatctggtaacagaagtaagtggttttaggctcgtttccttctgtaattctgactttccaatagcccgaacgaaggtccagctttgtgaagaaagaggcttttcgtatagtatgtagagagatccggatttccttggcgcagagaagctatttttccagctgatacactctcgaagatcagttgcaacttcatacctcggtcctcttacttccttgggcttgaaattgctcggtctacagagggtatttcagtttgtcaacgcaaatatgctctggatctagacaggtttgttggctcgctgagacctcttctatccctatggaacctaatctctgtctaaggattctggtggtgatctggttgatgcagagttgtatcgtaggcttattggcaggttgatgtatctgactattactcgtccagatctcacttttgctgtcaacaggttaagccagttctcatcagcatctcgtacagcccagatgcaggcagtttacaaggttttacactatgtgaaagggacagttgggcagggtcttttttattctgctacatctgatcttcagctcaaggcttttgctgattctgactgggcttcttgtcccgacacacggcgctctgtaactggcttctgttcattggttcctctctggtttcttggcgctctaagaaagagcatactgtctccaggtcttctgcagaggcagaatatcgaagccttgcatctgctgtaagtgaaatggtttgcctcacaaatttcttgcaggaacttggcattcaaatgagttcttctgctcctcccttttgtgataacactgctgccagacatcttgctatcctgttttcagcgtactaaacatatagagatcgactgtgtgttagaagttggttgcaggtctattcaagcttctctccgaactgatctacaaattgcagatgttctcacaaaggcattacatccaactcctttccacaacttggtaagtaagatgggtttgatctctatttgatcccgggggaattttgtgatgtaatgtgatgaattgtatagttgcatctgtgattgtgatgaattgtatagttgagtctgtgaaccggtgttgtataaaccggtgtaggtacttttctctcctttggttaaagctccggagcctccctagtagtagctcaataccctgagtagctgcgagagtcttactcctcaggtcggaatatgaatagccaggcggtttgcgtagccgctctgctcctgccgagatagactgtttgtgttgtcctttgttggtttccgttctgacttccctatggtccgagtggaaagaagcggccaaaaggattagaaaagattccacaacgggaagcaaggcagcctttacccaggttaccgaacctagagaacaagggagagcaactagcgaaccattatagtattagcacaatcactttctctgtctccaatccctttatgtccacgtaggaggatccctagttatggatttccgtttccctatcagaaaaataagacaggagccataagtcattaacatccttttagtaataattctgttctgtttacagccgagtctgcctttggaaaagaggtgctttctcttgtttgattaaacaaaccaaccggggaatggaatcccgtacaatattttgacgtttttttagagtaaaccccgtctttaatcactcgtagcaggaaagttaggaggtcctatcttttactatttccgtaaattatccttttctagatacgagggcaaaactgtgtcaaaaagtaaaacccgtctttttactttttgagacctctctttgctcaccttgtcttatgctacccgcactcattaggtaattgttcagtaataggcagaggtacggagtaactcgtagtaggggatatatctaagagtcagaccttggaccctatcctctctgatagatgatcttgcttgggccactgaagaagaagaatattgaggaattggacttagcattctatctaatgctttgatccatataagcccattaacaagcagtgtgctttgttttttaaagaagcaagctagaggagagggggcttttgggataattatgatactgagcccaatggaaaagcctccgagtccaaaatggaattactggggaaacgaatccaagaaagcccaaaaacaaaagtggtcgtggagaaggggacttattgtactgaaaaagttattgctagtgctcatttactctatacgcgtcttagtggactgacagagtgagctggaaaggttccgtctttccggggaaattcaagagagctagcttcggtcttagctcacctaagaaaggacggagctgtcgagtaaggattggccgagggcttttatgtacctgggaatcagccaatcaaaaatagacaaagaaaagcgagctctgagcaggcagagctaatgcaagtagggccaacgaggactctggtcaggagctgtcgagtaaggagtgctctgggctttgcgagaaacgcgggggagtactctctactgtgcgttctattattgcctcttctttctgagggagtgatcggtattaagccgcgtggcaatacccgccaaaaagaactctttgatggatggggcctttaaagtcttcagcgtacttaattaattcttcagcggactaaagggtgttccatattaaacgtgttacgtaagaagactcattaagttaagataagaagactagcctgcctataaatagaagcagctttccgtctatatttgagaacacttagaagtcgaaagttaagagagatggatgatatggagatctataacaggctggcgaccattccacaagaaatcgaagccgcggaaaacgcaaagctccactgggaggaaatgctgggcttgttctgggagcacccgcctgctctggacccggaatttgtgggtgcaaggatgcaagtcttacgggaccgcattcgcggcctgcaacaaaggatttctggtctcctgcaggagcggaactacctaattgtgtgtactatcgaacacgctctccagcgccagggagactagaaccactctcttctaatatttaaataaggagtccggtcgacccaaagtactgcatggcttttctttgttctccttttgttctatttctatgtctttttgtgttcacgtactatgttattagtgaactttgtcttgtgtgggggtctacggtaggcttcctcttttatgtatgcttgtaatgcttcggctttgtgaaatattccttttaatatccggtcttcatcttccttgctacttcctttgtctaacgcactgccccacagataatcaaagtctgtaatagcggacgattctatcaaaccctaaagtagaagaaaaagtagaagaaaacctacgaaaccataaagcttccctcctgtttggtaacaaacagaaagataccattgatatcattggacactaaagggtaaaactttgctttgtgctgttcacatagtcgactgggaagtataccggaaaatctcattaatcttagtatggaagagttttctttttacgaagcgagaggaaaagagtcaccggcaaagtcttaactaaaccctgaaagcctcaatcttcacttccttcaaggccttctcattagtaggggccgatctgactctgcagtgtcgctaagcagaatcttctttccatctgctaatggacctatgctcgaccatcaactctgacatccataagtagattaggaggcatcttctctttccttgtacgttccagctcgcttcgtctgcttcaggaagaaggtataaagtgtatctaccttcaacagcacatcactacatactaacattagccctaacatctcgttaagccacccacactgagatcgacagtcaaaggaagaaggagatatttccggttacaactcaaaacgacactgtttcactaaatgaaccaaaactgggccaacacaaggctcagctctcctatgactacaagacataagcccaagacgagttttgtctacaaaccgaagcccaaagtatcctctgtcttatttatcacttaaaacaaaaccagagctgaagccatgaacgtacagcgacgtcattctctgccacagtacagcggctcaaatcccacttctaaccgttaccatacgctccaagctttagagatctgctaagatgaagacacgtagcattagagaaggcttcacctcaaattttgtattaaaaacagggaaacaattattaagagatgttaagccgaaatgaaagaataaattcataatctttcctcattgagcatttattacctttgcttacaaagggaagaccctcttcaaagagagtgcaattactttctggtgagactttccgtttcacagttcctgaatcaacaaagttttccttttctcttcgatttgttgagtctcggatcactttttttcctcaacaatggcgaaacggaactagaaatcgagaaagaagagatcggcatcaccaccagtttcacctgagcatactccgctctggaagtaaccttacctagtggatcaagggtttctacagctcagatcctccccagcacactccaatggtttgtgttgccgatcgcagcttcgttgtctcagattcaccagataatgtttctagcccttattatcttcggtgatcatccgggtctggctcaactcttaatggatctaactatgctggactttgtatatgttgactgaagcgctcttttattgatggtagtctgcctcgtcctagcctagatgatcttattataagttataagatctgggtaaggtgtaagagtatggcgaaatcctggattatgaatactagagatatctcgatcttatatatgcaagatacggcaacggaagaaattaaggaaaaaaggttatagctctcaagttccagtctgagctactgaatgatccaaaatgaaaagaaatatttttagctttaaccaaagaatagacgaaaaaagaggtccgaaggtgctttagcaacgagactgatacctccgtcaaacctacgtcggggaggaagcagcaaatcacttgagggagatccttcttcagccactaggtcaggtgcagaagtctaagtggagtaccggcaattcgttttcaaacgtaggaaaggtgctgtccagcacactgcttttctttttacctttattcctaagagcaaaagaaggtaaacgagaaatcacactcctatgctttgcttgcattaattcttggaattgctggggtggcatgaccagagtaatctatgccctcgctctactgcttatgttcagattcctaagctggcagaattctatcctgaaaattgcttcaccaggaagtaaagttctttccgttcctgctttttcttcgagttgaagaagcctttggtttcaccgttttacgctttgaacctggacctgctttctttcttcagcataagcgcacactcccagcgaagtagcccccgcagcctcccgcagccccgtagcctcccgcagcctcccgcagccccgtagcctcccgcagcctcctttgacggaggtttgacggaggtggcgaagcaacctactttgacgtaggtctttgacgaggggctttgacgcgggtttgacggaggtgacgaagtaaccccttgagggtgtgggcttgagtaaagcagcaaatttgtttcactagcaaagcaattgtccgaatgaagcgtctcatctttatcacaaatgctacgaatccagagacttcctctgcatcatcatcctcgtctgtttcgctctcgctccaagcaaaccaataagggagtattcacacattcagcttttgtgtgcccctagcgaagcaacctttgcattaaaaacatttgaagtctcttctctaaaaaaaggcagtgctcagctttgccatatccctacactgttgttctcccttctttgacacacgatcacgatttgttgttgtgttctgtgtaaaagggtttttcctactttgtccattcttctttactactttgccaaagtttctagcaagcagtgtgctgccgattgaatcttcaatatctctcttgttgtcttagtgtgtgctgcagcaatgctttttctcggacttctcagtctccatttcatacgcttgtaggtgacctacaacaacatcaaacgcaagggtatctatgtcattcatggcttgcgaagggctgcttcgccgggagtgtgctacagaacagaagctttttgacttttgtctttgtctttcattttgagcagcattggcaaagcacagatgaattgttcaatggtctctctttcctccgtgaagccagcagcatatcaatacgagatctctttacacttgtcaacccttctgtaggatatcccaagcatctttggatgattcacccttgaatgtgtcacttgcgattgctgacagtgctttgctgttatactttcgacttcttcttctcagcgtctgtccatttatcactatccttttcttgccctgccgcttctactcctttcacccctttctccacagcataccatgcgtcttcataaatgcctcggtgcatcttcaccttcttttatagttccctttctgagattggtcgatgcacagcaatcaattccttagattcccgcagtgtgctgatcctcaccacctgttgtaagtagtcttggtatttggtcggtaagtaaaggtacggaaagagcggacaactaattaaaatctctgaacgtgatacgtaaatgggagaaaaatatggatgaaaccccttatctatctttccttcggcaaaaaaagtttatgaagccatcctcgcctcggggataagagatctttcgattctggagagtaagcttcaagctcaagatctcatttgtgatcttcttcttcgcgaacctaatctcaagtgaacatttattattgaattctcaattttcgtataaaaatacctgcctttcattttattgaagagaaaacctccccccatttgaacgaagtctctggccttccccgttatgactttagagtatctctcacgtcttataagtcacttaaaaatgaatgggcggataggaccactcctgcttgctcttggccttggctgcttagagacatccctttagttcgtcttagaggtctcgattggtattgcgcggtcggtaacgttggtgaattaggtaaaggtacggaaagagagggattcgaaccctcggtaaacaaaagcctacatagcagttccaatgctacgccttaaaccactcggccatctctcctacattatgacccagaaacctcgagtgaatagcgagtcatttatattcttgcagtaaaggtacaaccacaaacaatctattaaaaatggaaacctttttagtcaaagaaagatcttccttcgaagaaaaaaaaacaataagaattgttaccattaaaaaaaaagcactctttctattcatctttgtcaagacgacgatctcgttatattattatatttataccggattttgccaatgaattggaacgcgaatcaactactcccttcatggtcacatagtcattacagaattttgtttcaggtatatatgtctttcttaatttcatattggtagtacctatttttctatataaattctttgtggtttttaccgcccgccggttcgcttatcgcctttttttcctccgttcactttctcctttatcttcttcctaccttgcgggggtgacttaggcgctagggttaataccatattatatcgaataactccttaccttttttcaagagaagcctgattctagtcaggattgaaaagataatgacgaaccttaaatgaaaggttggtccaatctgagtgcttattgtcttcttcttcgcctctcctcttccgcccgagctgatccgaattctcctcttagtataggattgttaataacttgacttaatggttatagtgtaaaggttagttctatattttttctttctttatcagaggttttttccttaggccttggggggcggggcctcttttttgattttttaataaaaaaagggggagagggaccctttttgatttttgaagtacagccctactctatagtggagttatcttttccctatctaagctatatcaacatagcaaactagaaaacttatctgcttgtcaattcttggtgtaatatgtaaatgattggtgtcagaatttttcactgatcaggtgtgatcagtctcatccgtgtaagaattaggaattcctcttccaactcgtcccagaatgggcgttatggcaaagaacaagaagaaaaccaaaggagaaatttgtccaatagtaacaaatggtgcctccacaggttgacatccgatccaacctagtagtaagcaatccgccaaaagcaaccaaaacattccttggtgaatcggtcgaaaacttgaactacgcacatacatacttttaaaaaaaggtaaagccaagagacatataaaaactggtgctattgcggctacacctcccgctttgtcaggtatactacgaagaatggcatggatcggtaggaaataccattccggcacaatatgaggcggggtggacatcggattagcaggtatataattgtcgggatgtcccaaaacattaggagcataaaaaatccaaatagaaaaaaagatagcaaaagctacccaaccaactagatccttgacataaaaataagggtaaaaagctattttatccatctcagaatgtacacccaatggattatttgatccatattgatgcaatgcggccagatgaagaagactggcgcctactaaaataaaggggagtaaatgatgaagactaaaaaaacgatttaaggtggcattgtccacggagaaaccaccccaaagccaagtcactatggtatctcctactacaggtatggcgctagctaagcttgtaattactgtagctccccaaaagctcatctgaccccaaggtagtacatatcctataaaagctgtcacaatcattaataggaagattacaactccaagacaccaaacaaattccctaggactgctataactcgcatgatatagaccacgaaaaatatgaaggtaaaccacaataagaaacatacttgccccattagcatgcatataacggagcaaccagcccccttcaacatctctcataatgtgttctacgctgttgaaagctaaatccacatgaggtgtgtaatgcatagctaaaaaaacgccagtcactatctgaatgactaaacaaataccagctaacggaccgaacccccaccaataactaagattgctcggggttggataatctactaaatgctgattaagtgtggaggatataggttgtttaagaagagagaatcgttggttccttatagtcatttctctttcctatcgtgacaactcttgttcacccaccttttttttgcgttctagggccctaaaatatcctcaaatatatatataatattgatatttgagcctttcttttacttttgaaggatggagggggcgaattaagcgtcgacgtttttagaattctttctcctacacacttttgccctctttcaccgaaaaggaaagaagaatctttcaagcgggcagagacctaaatttcttagattcattcctaagcttgctttgtcgcagcaagatggattggatgatcagtccgagagtgctggagagaagagaaagcggtcaaaacttctctgattcggtcaccgagcagtcggacaacccttcagtaacccaggatggatgacccgagagaagatctcgtccaccaagcgggatagcggagtgcgatccttaagcaattggaggttctcgctcatctcttgggatccatatcatctgtgaaaacttttcctgttacattagcatagctaaatttgaataggatgactcagcgtcaggaaaagtaagcccccctttgccttgattgaatttggcttcgctgcgctctgaatcaatcaataagcttattgattggattcatcccatttcatttgggcgagaggtccgaaggaacaaaggagctcgactgtaaggagaggaacgagagtgaaacgagagggaggctggggcttatccatgggacttgccttggcggttagactctcttttaacacatcctcgaattagtctcgtcggttggttgattctcgaaatcacctcttgagaaaaaaaaaaaaaaggtccatcaggttttgccctgccatctccggcgaagctccatatccgtgagactggatcactgtaattcacagaagtccatttggacctctccttttagtcgagtatgtaaacaacctctcctttcagtcgagttccctcttttataagagtaataaattacgttggacctctcgcaacaagtgctcgagtaataaatacctctccttttagtcgagtcatttatacctctcgggagtaggggctttgttctgggggggccgacttgcgctgctttagaagggagataatttcataaagtaactctctctatctatccttagaagtagggcgatagaaagtcaatatgagatttgcgttggtttttccaacgaaacaaagcattatcattcggaaggctcagtcccaactcggacttccatgatgggaagaacctccgcactacggcgctccaatgaacaagagttctccgccttagtatatttagaagagtggtcgggagttacattcgtaagttaatgttatgttcatgcattatatctttctttccaagagtactacctgtacgtagtctatgtatggggagcatacttgacaggaaatagacacaagcggtagagaggtcccccacttcgattcccgccccgttcgcatctccgatccaagataagggttttaaatacgttacttttcggtccggagccggctggtaatgggcttacttaccttgcttgtggaccagctgcggagctaacctttctttgttctattggtttggtggttgctaccaagacgatttatttatgcccatcaaagaacctcgagatgctaatccacgaaaaacgatacgagaaattcgaaagaactcagatacagaacgagggcgaccgtggaaatacatcggtttctgactcgtgcaaaggaactatttcttggcaacttggacaacttataacaatgtttgtcccgcatatcactaggaagatcgggatctttacaaaaggctttataaagctttcgtctcaattcaaatttagccgcgagcaatctacgtttgtgatctctactattttgcttctacgacatcttactgagtttccccctcatctttttgcaaaaaaccgctccacagtggtaaagtctcatcttgtgtgttggccgaagtgataatagtcacattgaacccccgaatatgttcgaagatctcgaaatgatcttccagttccggggagaattcgcaaaactccgtttccatcgagaattgaatggagtttttccgtatttcgaccggaaaatctaatagagacattactgtcgagattctgaccgaaaaattagacattccatgccctcggagagtgctttgtcgtgctaggtcacttacatatcctttgtctttatttgaccccaagaatggattagatcgaaaggactttcctgtcgaacccctttgtgtctgtatgaatttctgaccgcgcggaatctccatagccaattttccattttttattatgaaattatagggtgcctttggtactactcttatttcacacgatccaggaacttccataacgttggcgtgattcggtttgagcaacggatcttgacgtgatacatcttcgtaatgaaaattgagtggaaacatgagttggcttttacagtatctatagaataagctgactcctcctactcctcctttccgaaaagatcatccttggtccttttgacataagattctcggcccgctttctccccatcctcacaagccaacctgacagcctcgcaagataacacgtacaaagacagatcagatcaaagggttactcccagcaacattactaacactttactgaactaatgaacatccatataactttccttcactaatttctttagacggacttccctcttctcttattacagttagaacggattgaaaaaacaacttacacatttggcacaaagcggccccattacaaacaggagcggcgggaccgggacctccactagatttagggaggcagattgcccaaacaaagcacttcactcttatcttatcttatagtgaaattccagatcaaaaccaaacaaagcacgcgtcttcttaactaactatttagttagattccagatgacaaccattctacaagacaaagacgattcaagaagccgtgccttgaagaaaaaacgattccaaattacaaaacattcgaaatgacctcctcccaataatctaagagctacaacgcagcgcaaagaagcgagtgaattcgatggattgagctccaaacatccataccactttccttcactaattagctggacttcgaaacataggaatcaaactgggagaacaagacataggagaagacagatttcgcacctacatgatagtgccagttacgcacgtactttatgtgagtcaagccagaaagcagtgggaaaacatcacgctacaatacaacagtacgtaggttccaatccacgaaaggaatacaggcgtaccgagggagcacatagctagtcttatatggaaggaaaagcacaagccttaccccgagaaaccccatgctagaataggcctatgcactcccatacagcgaaggaaatcagatcgagcatgcaaaaattcataataaatgtatcataattcaaggcagaaatcccatcgagcatgcaaaaattctcaattcaaggtggaaaacacctccatctattcaaggcggaaaatcgcatccaggtaagagtgcaaaaattcaactactgcatgaaaattagagggaaggaagcaagttaataatcgcatatcattcctttttgacatcacgatttcagagacattcatagctcaggaatccaccattaaataaggctcccaatgcccactcaattatttgagtcgtttcaaagaaggagatgaaagcgagtccaggaaggtcgttttgtttgaagttgatcagtctaatatatctccctccgcccttggctcataggtagctctggaagttgggatgtttgcaattctaaatggagggattgggaaggaagagtgatcaatgccagctaaggttgttaggtatctttgaaagagtagcgttacagttcatgtcaaataagagtggtgggaattccatctcaaagaagagtgttggtccagtccatctcaaagtttgaggactcaaagtatggttcaaaatctgaggtatgagttgaggatgggctatgttgccactgcgaggtcgttcttctgtttaggtctccctccggctccggtcaaggcattatctgggcgctgttgaagcacgctaagaagtcgctttaggaagtcaatgctgaacgcttttgctttcccgcaaacgaatgaatgctttcccgccaaacgaggcttttgcgccaacgaacgaatgaaatgcttgaatccgaagatgccgagtaagtcgatgttcggtggtagcgtttctgagaatctttttctttcaaagatacggattggtctttctttccctctccctttgtcagagatcaaattacaaaaccaagatttccgtttggagggacagatgagttcctttgatccctttgttgatgaatccaaggcactggttcgacgtctaggtcagaaggtcaaggcgaagtcctttctttgtcgatgagttagtaggtcatttctaagagttaggtcttcaggactatatcataaaagcggctaaggtctttctatagtttcaaatgtcctaaactccagggttgttcaccaatccaatataggtatcagcacgtgaagagtatccggcggtgggcgtgttatctttcaaatcttcaatctgaagggagtagtcaccaatataatatcatttctaattgaagagagaatccccattgctgtaacccgggttgctttcagcctagcttgcgtgtcagtctagaaagaattccttgccttcagccgagcttgggtccggggcacaggtaaagaaagaatcctccgctttcagcctagctggatcctcttgaatcgtctctccgtcaaaaaagaatgtggcggggaaaggtaatggtttgagagagaagtatcggctccggccgtggagctatcatatcggtcttttcaatcttgtagccgagcgttccccaatatagcctaagccagtgaagagaccactaaatgctgtcatgcgagcgagtaagtcgacgaagaaagtcttctattctattatcgagttgtcgttcaaaggcggtcaagaaaccctttgttgcgttcgaatgtcccgttgaaggctctactatttcttattgttgttgctgaaatttgagaaaagtgatcaggtcgacatctcggtcaaagaacaaaggctagtcgtcaacgagcaaaggcagccagtattgttcaaaggttctcccggctcgagtccggtgatggctcctttcgtggattataatttctgaatggccccagatagcgttaagttgatgggctttcaacctgagaattctcaatatcatctatgggtgaatggtatcagaatgcctcttccgaaatagaaggttattcggcttgttcgtgaaagcacagaggaattcaaagcattgtagctgttccgaggaagttcaattccagagatggctagggagcgtaagtgggtgacgattaacgtgatagaaccttttccgtagttctttcccctttttttaaccttgggttcagattccatgattcctttctttcagttgcagattcctcaactgctcttagacaaatgtagtccgagagtaagatattaggctaataaggaagaaagcggtcgttcgcggattgcagtttcaggtttctaggaaggagaaaccgggtctcgaccaaatcaatccaatagagtaaagggctagtagcggtcttcccgggctcaaggtctagtgcaatctttgtcttatttgagaaagaagtagccgagcctaggacgaaggcacgaaatgctttctcgccaatgaatgaagaaatggtttctcctttcccgccaaacgaatgaagaaagggtttcccaagtcgcggatttattattctattataatagtctaaatcgattagccaactttgcccaagctcaggagttagtgctttcctttcatattcattattatataaggtagacagatataaggtcaacagaaggtcaactcgcttcagaaggctggaggtaacctaagattcctaaatgcaggggtctcatgcattccaagtagctgaaaagtggcaacttggatgtttgaaagacccgccggattcgctcggagactaactcactcgtctcgttcatgtatttactcgcagcattcgcagcaaactcgcaggcaggagagaccttgagtccaggctcaggaatcgactggttccgagcggactcgggcagctgctgcttggattatcgtagaataagaggagccgtcttaggaaaggaaatgactcaacttcaaaaaaaaaaagacagatgccgcctacctactcgtgctcgtagctcgatcggaggtcaagagccgtggtccggcggaaaaacggaagtcgtccgtatcaagtaatacgtgaattgctcagtagtgcttcgccactaccgtagctggcggaaatagcttaatggtagagcatagccttgccaaggctaaggttgagggttcaagtccctccttccgctcctggtgttcgaactagtcattaatggtcggcttcattggtatcctttcggtatgccttgcgaacattttcatttttagcgccttctcttctttagagaagccaaactcgaacggatagagcagatggtccaactacataactttttcttttttattatttttatggtcgtgccttgtggcacggcagcacccgtactattgaaatggttcgtcagtagagatgttcccacgggtgcccctttttccaatggtactataattcctattcctatctcttcattccctcttttggtctatctacattcaaggaaaatcatacgctccatggacggagcaaaaagtggagtcttggtcagagcaagtcgccctattctattaccagacataattgggagaagctcatctgaaactagagctagaaaggccttattttttttcgttcccgttcttcatttccgtcttctcgaatccaagggggacttctcatatttagaatctttctgcggtgtgctctgtttactattctttcgtactttcctctttttagcacgcgataggtcagcgaagcgtgagcgggcgcggagaaggaaaggccaaacacttcggccgaacgggaatgagcaacgacgaaatgacaagatgaggtgctccgggcacccccatttagatttagaaagaagggtcgaaggttttgggcctctagctttccccgtcccccctgagttgggtggtgcttgtgtggggggcgtgccaccagaaatcgggcttgaagctctcgccttaccaaggagccgacagctgatggctatggctgttggtcacgactactaccaaaaggttccaatgaagatgaatatttcacatggaggagtgtgcatctgtatgttgggtgttcttctgtcgtgcgacccggcggcttatgtgcgacctgtggcccacgcctcctatttgttcagggcgggcggcgtgaactctgattcgatccgggtattcaatcccgccgctgagatgctcagttgactccttaaccttgataggaagatggcttattccaaaattcgtgcataagggtaaggaactttggatgaattaatgcgaatgggtgtaagcttcgctgctcggaaacacccagtgctgaccacactgagagacacgaaagcgcgggtaacgctagttggcgaagtggcgttaagcatccctagcggtacgaaaagagaggtcgtgatgatatcatctacgtccgtaccgctcctcgtggagtagatcccgcatccaaccaagtctttgaccagggaacgggataattcccactaccgctggcaggccagccgggccatgagcgcggtgggaacgggcttcccaaaaagccagccccgggccgggcggggtcagcatagaatgaaggggacggccctaatgttgtgttggcaaagccaacttcttaggttgcggacggagaagagcggacgtggggactcgggtcggggtgcagcgtaactaagagagccattccatttagggcgagacagaatgggcgggcacgagcggtctggtgtccgagtcaattggtcagacgacgactacttcacttattagattagtattagccgcctatcccggaatgaaatgagatagataaaatagaaagaacgcgaagcgctagcgctataggattttttgggggggataagctcgcttcttcacaagcttacccccgccccgaccggcagctgctgggtctccccatctctcctaaacttcccccggtcttcggcccgagctgtatgaggcagaaactcgtcccacgtacggttcggaggccgagccccaccccagcagtaatggtgcggcttaggtcaactaacacaaagaagatacagttcactcaacgattgcctttgggttacgaactccatatggggaaggaacgttgttgtttgcgaggtctcgatcatttacatggacccacttttcattccatttgtgggaatttgatgatctataaaccgtccctaacgaacgatcggctcatgtttgagcatgatgaatcacttcatgccgacctcttgctaataaactttccggcctcatataagaatggaaaacttgagcattttctgcattggtggatgaagaatcgcaaacataataatttttggttaaccatgttcccagaaaaaagatactttcgagaaaggacgagcacggctgaagtggctatacatacaaatctatttacggatctatatgcttcgattggaactggaagttccagaacaggaggttggtataccaccataatgaaactgccttttattttttttattcggataggatttatgttggcttcgttgggaggctcgcctagtttgttacgtcagctccaaaaggataagttgcgttggaatcgagaaagttccgtggagttcataattgcataaaaggagtcaaagtagtggctgcggcgcgtcaaggcacttcttcgacggtctccgtctcgcccgtttgccatcagtaataggaaagctttcaatcaatagaaatcgtattcgtgaataaatcccctttgtttgaatccaatattatgcacttttttttcggtagcaggactctcctctgtccgtttgaactcttgagctggagcaggagcaggagaacggaataggcatccattagctctgtcccttcgcacgacatctatgaaagcagcagtgggcgaaccggcggtgaacaggaagagggaggaccgcccgatcgctaggaagaagcaagcctattccccgcgcggatgtcattgctcactagctcctttcgtcccttccaacgcaccatcaacaaaaagaaagaataattctgaataaaatggactactactagagccacgggagcgagccataagcgagccttgtcatagtattaggagcgatgaaaaatcccagtgaaaggaatacgtagcgaataaggggaagaatagaaaagcactcttcggggctcactattgcctctattacataacctttctctggtctactctcctggtcactcaacctattagcctggcttaggtcgaaagggcttccctgtttcctgcttgaccttcgtagcgcatcaaagagacttcactaaatcacttttttctttccaagtagtcaattagactagagccaactatttgattcggctacacttcttgacttcatgaatttacagattgaaaatgaaaaaaccatttagagggggatttgcgggtcttattcaccactttcaactgactccttatccaaggaacagaaagctactacagaagtctcggcttactatcttgaccagcaagaaaaggtgaatggaaaattgcctcagatatctttctttcaaagccgtgctatctagctcatctttatgcaggaaagggatgcgcgtgactaaggctatacgctgccccgattgcttcttcgctcgttcaagaattctatcttttcacatcgccaagcttctacggtaccaaagaagaagggaaactttctgttgattctctgttcacattctctttcaattcctctgcataatagacacacattcccagcagactatctagcttctttgaacaatcttcttgctgtctctgaaccttcttctcagaaaaagaatgagaccaaagaggccatgcaaaaataaattggtgcactcaaatccaagaagacttcggacattaccacctaatacaaaggcttataggctctaatgtataagatccagtctcatcctgatggttctattgagagatagaaagcgtcattagtagctaaagggtagacgcaagtgattgggaaggatgataaagagaccttcgcttactaaattttaaactgtgatggttctaatagacttggttggcgacagctatggcctatctaccaacttgacattaagaatgcttatttacgacgtatgagaccgtttgcctgttttcatccccatatttgtggtaggcctcccatcctcccataaggattgtagatttgcttcgccctcacccaatcgaagggactcctaggggtcgtttcatccaccggagagcccatccttagttgttttgttttctaagttccgtttccttttattagtctgagttcatcttttccgctttcaagcgtgtacacacactgaaaaaggataaaaatatccctttcattaaataggtagctcactggagcaagcaacgaagtgccatagggttcaggataaacttatactgaagtaggtataggtacaatctctttgtggatcaatctatagagttcatagagaaggaaaaacctgagattagagttggagaaagccgcatagaatacgaaaagcaaaagcgaaggtgactttacatctcagtcgaaagcggttaattcggatccatttcataagtggactggggaatctcaatctcaaaggtcttcgctcggttccatagttcaatctaaagcctgtgaggctggaaacttctacaacaatattacatattcccatcaccagtaaacgatacagtaaacctttaaataggttcactctcgtccatgctcaagggctaaagccagccgtccttctgaaaggtcctcttctacggctcaaggttcaagctaaatcaagttccttttctcacttaagcggatactccaagtaaaatcaatgctttaaggaaagacttcccagcgcagtcaagcaagataggattctcaacaggataagttccgtggacaaggcgagctagcagcggtgctttccttccgtgccgtaggtcaatgaaattatctttttcagcacgagaagtctcaaatgctttcagaagaggtcagaggtaacttgttatataggtagccatgcgtgttaatagatcttcttcttgatgtctataagttcagattggatgggtgccttgggtatgctttcaaaagggctgttttcatgcgtgctttcgtggtctcttgctttttctgttggatcatctacaagttgagagtgtgctcgggcaagtgggctaaccggaactactagtaacgggagctgtaggtgagagtatctttcccgcatatacaaatattccttaccaggtgtccagcgagaatgttttgactacgtaagcgaagcagacgaatccgccttagcctattactattactcaaaaatgtggtcgagacccctcccttatttacatataaaagaattgcacgaagtccgatcgaggagcagaattatgctgcttgctgggccctgatggtggaactggcattttgggggggaagaaagcggcccccttttgcggcagagtgggcagcatcgctttccctcgtgtagctatgatgccattcagaaacaacacaagaaaaaagaaaaagcagtatttcgcggatcggattcttgccatcactggaaaacaaattgagctgtaggcatcaaggtaagggaccgagattatatactgctgcagaagcggaatcgaaggggttggttgaaaggtaaggagatagcgtgattggccgattggttggaaggtaaggatagcgtgattggccaattggttggaaggtaaggatagcatgattgactggttgcgggtcctttggatcatgggccacagctacttgggtagagaccgctgaacatcatttggacaggccgaggctatatgggctgcgcgccttttgatggctgtcattttctgggctattttatttggatagacttagatcctttcatgtaggaagatagatggaaagcagctctctagcaacagtacggagggaacaactgacctcgaactgacctaacactgaagacctaaccttgaagctgtctgggtctttggtagtccaactactaaatctatagagatgccttcccaagatctcttcggtacgggtatggatacactcctcttgccacttttttcttcctgacaaagacgaaacgcaccctaagagctctatcttgcattagggagtcggggttctcctacaccaccctactttttgttcatagggggtctccaaccatgcggaaagccacacaatcgcaacaggcacgatgttctcacaacccggagtagagttatatggatttcattatttatgactgacattccttgcttgttggacaggaactctttgattcaagatccccttctactactggccagtaagataagggactatctagtttgatcatttacgaattgcgtagataatcctcaagtgatagaaaggttagaagacagagaattcgtggttgagctcccaggcaagcaagctattgatgatggcttctgtgctactcgagtaacttgtgctgaggtggctgtgactcaaaaggtttatgtattattttcccaaaagaaatgaaatttacgtgatgcgggaacctactttccctagatccggattgttaatatcgaaacggagaattcgttaccttccgttattgcttactttgctagctaggtatttcctattttgagactccttactgaagtaaaggaaaaggcacttccaaagagctgacacaaaaaggatttcaagtccctggctttgctctaaggatttcaagtcctttgctctaaccggctaagcatcatcggcttggtcagcctttacctaaccaactacctaatactacgcaggctcatcaaacaactaaggatgaggaacttgtgccagagctagaagtgagtccggattcgaaccgcagacagaaggattttcagtccctcgctctaccagagctactacctgtcctcacttgatgatctaaaaacgatctttcttctcttatgaaattgatagtttgtgagatcgatgcaataactcgactgtaaggtccaccaggtccgtaggagagtcagtctttctctaagcaagctgttttctggcctatacggaaagagttttcaaagaggaacccagctcttctcccctctcagcggagaaggaggaaccaagcttctcccctaaaggagaagggaggaacccctttccttccgtcagtctccaattttcgttagttctctctcttaacagagcggaattctcccaggtttcagtctctttcgcttactgacgaacggagcactcgcatgtctttaatactaaatatatccctattcaccacataggaaccggccggagcttgactaattacgaatcatgaaatgttgaccgaacagtaagccatttacctggatcccatttacccgatgctgcaaccaggactttattattgactggactctcctatactcggaattgcaggtggagtttcaattctctcgtgtagagctattaccaatatatcgatccttctgatgttcacagtttgacttgtggttagactcttcctctcaagagttcaactgctttgtcccttccgaaagtggtttacatggggctggtaggtctctggttgtgacccccggaggaaccctggctctaaatagcaagactcggttttgttccgtttgatttctagttgggaaagcataagtagctgcaacacataagattctatttcaccagtgcccggggcgagtagttcccgttgcaacaaagtaagtcgtttttgccacttctaaggtttattctagactcgatctcttcctgtagctcatgaactctcattcagaaagatttatatcatacagcagtgagcctttttgatcccaaatacatatagcacgaccgggttggttcttcttttgtaaatcgtgtcaataaataagggtgaagaatctcctgttgcgtgatatcagatatcacatggaggaagacagctgtggcgcccacctgcgctggtccgcgtctgactactgttccctaacttacattccattctcaggatttgctttcccttacaaaactatcataaaactgtacaagcataaatagtgaaagatctccttcggaccctcacctcaatagttatcttactagcccacggaactcatcatatcagagtaagtaagtaagttacctcaaaagagagtaatgcttataggaggtctatctcccttctgtcatgcccttccctttttgcttttttagtaagagctgcctcctccttgctgctcgcgctaaagcaattgtagcagctacagtaggagaagaatgccgacggctttcgttgtttatccagtagttgaactttcggaatagaataggctcaatgactttgcctgctttcttgcttgccccgctctccttagaagcgttggttgaaccgctggactctatctccgttgattactattggatggagctatagaagctattttacctacgtgaacacttaagctagaaagaaagtagtatttctcattatatagaaaagccttgaaccgggtaacccgtcatgggaaacttggccgaagaacacctctcacagagtcatcggtatccctgataaaaagaatcaaacgtcgaatggtccgaatgaatgctacatcaggagccgagtttacttcactcccggtgacccgccgtcgtaatagcactgtgggcggaagttactatgtgatcacggcttccgacactgcattcatccagacaagcccttttagatagggcttttcgagtagagaaaggtggaaactcttttcatagagaaccccttctggaccaaagatgggcatcccaatcacttttgtcacaaccaactcttggcaaattgtgttcataatatattcaataatggtctcgagctcatctgtaaatcatggcatgggtagagaagaatggctagctatccttgagtgacacatcgcaatgattgtatcgaagacgggcggaggaaccccttactttactatattatatgtcaccatccaatcttggttatattatgtcaattctgcctcatcgtgaatgaaacgttttctttgagtcacccattctggacgacgagaggaatggtgaaatatactttttaatgggtaaaataaatctctgcttcgttgccaattaccgtcctgctaccaaccaaaaagccactttcgtatgaatctattctagttccttacctggaaaaaaacctattggatatcccgacttgacgattgactctattggcttatcaatttctcacgggctggggaaaagccaaacagaaggaaaaggtacggaggaggaacccctggcatgaaggccggagattagaatagaatgctgacttctagtttttagccgggtaggagatcggggaagtcttaaaagtgagtgcatcagtcttatccgattacttaatagaagtcagtcagtctcatctttgaattgctgagaggacttaggagaagctt

SEQ ID NO: 190 - DNA, 85463 bp, Arabidopsis thaliana
aagctttgtcagagcttctcagtgaaatgttgttagaatctgatcacttgtaacttctgatctctgctataattatcttgtcatggaaattaagaaaaactagtttcaactgtagtagctcatttatatgctcagttttccataataaatgagtcttcatggacttgcctaatccaaattcataaatatctatctaattcgatggtgattgagaactgagaagtaaacaatggtactcttattgtctgtttttcttccaagaagttagttcagaaggaattgattcttcattgcaacttaaaacagctttagccatgagtttcccaagctatgcatgatagagtaaagtaattggccaaaaatatgttaaatagagaagcaattatctctcaacaacacaagaacaaaatgaaattgagagattccgggagcttcagaaccagttcaaaattcaacaacatactagttttgtaacccgaaccagtttaaaagaagaacattttgagtcaagttcaaccatggttatttatttcatttttttttcaaggtaacaacattctactaataacaacattaagaaaattttaatttacatatacgttcagattacacttttactttatcaactattctatctgcatctttactttaactatcggcactagattataccattcagcaatcttcaaacgctttcctaacattggcgtgacattttaactaaggacaacaaaggtggagaatacattagtttgaagcaagcgtaaaagtttactaagaatcttcatcaaatacacatgacataagcttctctttctactttttgcctacaaattaacttgataatattaaatattttgttttgtttggtcatcgctgctactaaagaagagagattgcatgcctagacgatcaagctttgcggacaatagaacgtctctctcgctggtactcaacttcacctctctggtgcattatcaacaaagctctcctcacctgccattttaacatgcacattacctcaaaaatcccattcacattactgaaaattaaacaacaaagatgttagcttaggtaccattgaatcgttcattcccattctagccagatcctctatcagtcttctctctgataatcgagctccgatccccattcttctctttatctgtgtttccgcttgctgttttttcacaccaataccaaatttagttattacatctagagatacgatgattctttcttccccacaagcaactaaccttgatttcattggccatctcgcctgttatgtttatctgttgatttatccctgatcttgctgcatccattgtcgaggtatcaaaaagtttaaaagctttgtctacatcatctggtgtggcctcgtgtgacctgacatatttaacaatgtcaatggacggcacatcccatcaggtttcaggaatcaggaatctctatgttaataagattacttacagtctcatttttgcaagtgactcactcagtctgacaatagcttcgagttgtctcactgtgataggtatcggagcagcctctcctgtttcatgtgcacgtctcttcatatcctgtttagccgaaaattttatactgacaccaactttgttttttaaccatcttattgtcaaatctaatgtaaatgacaattaccattctgattgtgacatatttccgctgcaggttctcagcagcgtcttttgagagacggggatgacaccttgctcgacagtattgtatatacctaacataaaaagagcattatattttagagtcatgattttgtacagaaaactgcgagaacacattgttttctcgacgaatgaaaacacaccttttgagccaattatcttctttagaatctgtgttttcatccgaaaatttgtttgcagatgcatgaacccttataatatggctggctatttcctgtgaaaagattataaacattaatcatgtctacataataagcaagcaacgaagcaaactttccaataacagtgacctccatcattaatctctgttttcccttttaactacataaaatttctgaaagaattgttcctttccttgcttaccttgtcttgggaatacttcctgatgtccttgacaatgaagataagatcaaatctagaaagaattgttgtctgcagatcgatattgtcctgagcagtctgcaaatccaaagaaaaaaaaacacacccatctcttaagaatattgcaaacaagaatcgggaaaaccatgatattgccaaaggagagtaccagatttcaaaccttaaggtcatcatatcgaccagatggcgggttagcagcagcaagcaccgaggttctagaattaaggacagttgttatcccagcttttgcaatggagattgtctgctgctccattgcctcatgaatagcaaccctataaagaaaaaaaaaacattccatcaattctactcatagagaaaaattagattcgtcaacactatgattcagatttgaattacctatcttccggtctcatcttgtcaaattcatcaatacacacaacacctccatcagccaaaaccatagcaccaccttcaagatagaactctcgctgcaatgaacatatgtataaataactgagaatctgtcatagcaactacttttaaacaaatcatagaaaaacacttgaagataggacatacagtgctgctatctcgaatcaccgaagctgtgagcccagcagccgatgaaccctttccagatgtataaacagcaattggagccgtcttctccacaaacttaagaaactagagagaaaaaaaataagcaattaagctttaaacatgtaagctacaggtgttggaaataacacagacattttgtaaggattgtaatctaacacttgaacagaaggatgtaagacgaatatcaagcaaataagagagacgtaagaaaatataaaaagaataacacacttattataaaccattgatactgagaccacattacaaacctgtgattttgcagttgatgggtctcccaaaagcaaaacattaatatcacctcttagtttcactccatcgggcaggctctgaatcaaagatagaaatgtatataaatatatcaaaaacgtatacaaagtgcacagaaaataaaaactgctatcacagtttcctaccttcctggatcctccaaagagaagacacgcagctgctctcttcacatcctcatggccaaatatagaaggagcgatcttggtgcaaatgttcttgtatacatcttgactatcagcaaactttttgaattcttcctcctaaaagtaatattatggaagacaaaactgataaatggaattgtacaactaggcttccaagcaggcctaaatgtttcatagtaaactagtagcacagagaatatttccagaaaacaccatcacattcatttgggagttacacaaagaatttcatagagccaacagctacctaaggcatttggtttccagtaacaataattcagccatgttaacttcaatagttcattgtgaaaccatggatgacataggctatcaaatgagaaaacaaaaagaaccaaatgatgcgatactaacttcgtcaggagtgaagttggcagggccacgggaactggcctcatttgtgtcttccagtccaacaactcggatataaggctggcgaattgcaactgctcctttatgcctacatcagaaagtaggaaaagatgtccatcattgttgtggtgtaactctcccagaaaacaatctacactctcatttgacataaaactacaaagcttacgagttagatgatgacgaagcttggaaaatgctgtagatacccattactgtcagtctggttccaggtacaattgtttgtacaagatgccgatcaactgagagaagcatatttcttggaagctctccagtaggaacatccttcaaaactcagaagcatttaatatatacaagtgcaaaaaaagcgaaaacattacaatgtaaatctatacctccggattctcctgtagctttaaggtctgttgatcaacatactggctcctatcaggaaccaccatccaaggatcaagagggcaaggctcctctccaggctaaacaaattccaatttggtctaatcaacaccaaggataactacaaactcaaatcacaaacgaatcaaaagaactcacctgtggaatattatcacatgatcgaggaacaattgccccaccaagacccggacgacatggaacttcccttgtctttttacaattcttacataccaaaaacacataagtcgcctttgctttcactctcgaagctgcaatactaatcccagagattttcaccaactttgagatgtactgtgcctatcaagagtaaagagtacattatagacataccccaagtaatctcattgatactaaaaacaaaaaaacagacataccccaagtaatctcattgatactggatcctctcttgaagtgagcaaaatctgcacatctctagtcagaggttcctccattacccctccctcattagcctccctcattttcaatccagtcaacacttcaccagctgctttctcaaactacaattcaaagattgactcactcaatacaaagcttatatgaaccctaattttttttgaagtcataccacagggagataatcggcaggagcagatcggattaaggaggggagatcggaatcaaaggagaggagatcttcgaggtggacaacaagtcgcttagggttatcgaggagagcttctctgtaggggaaacaattctgttcgatctcgaagtttcgaatgaattccttaaatttggttaagacggcgtggggactgatggttgcggcgtctccggcctccgggaactgcggctggtcgctgtagtaaactgctccttcgtcccatcctgacatcgttgcttcgtctccgttacgaatttctctatctctttctctcttatcaaaaagttctaaacgaagagagagagtgggggcaagggctttatgtcgactatgagttttggcgggaacaatgtggcgggaaactgatgggccgaacccaagacctatggacgggtaaatggatttcgttggttattgggtctttctttctttttctttttagctaaggttacattttttatccattttttctaatttattataaaaaaccaaacagataaaaatataattatggactacatctaggaatcttaaatttatgaattgcacattttagaatttcatatttttaagctacttaatatcgttgtaagcattttcaattccatcgtaattttcttcaatgtcacttaaaatttaaggctatattaatatatatgtttaaaagaatagtttttagttttataacattaataatttgaaaattaagtaactataaaaaagaaaagaaaaatcaaccatatatatccttctcatttacgttaattacagaaatgtcattaacatgataaatgtttttgagaatattaggtaattggacacttttttgaaactcaattacgcaataaagcactttagaaagagtaaacactttttaaagtttttttactactacaccatcaacccaacctaagcaatccaaacttaccataatttacaaccattactttttctctcttttcattcatttttttctctactctttacaaaattaaacacacaaaacacttaaaatatcttaatgaaaaaaggaaatggtttgagacattatctctcttctctctcatcaaaaacaccaaaaagtagatctagatttttcttttttctttctcttcttagatcttaaaagttggaaattttcaagatttttattcagtttctcattctttaatcaacctcataaggttaaaattttcatttttaattgctaggtttcttcttctcttagtgtatccatcattgtcttggtcaaatttttgtctttttacaaatcttagatttggccaccaaatatttgtggaaattcctcaaagagagagagagagttgaattaaagaacccaaacatatattcttactataaatttgtaacttaaaggtagtttgatgctattttcattaaaacacatgagcaaataatgaaaaaatggaaaaaatacaaaacaaatcaaagaagagtgataggcgataatttgaaatgaccacatggtcagagtttggtggatgtgtgttgacggtcgataattcaaaatgattgtgttttgttaatactattcataaaaccagtgttacgttatgtaaaagatgttgataaaatgtgatgaaacaagttttgttggtcatatcaacaaaagtttatttatgaaaatgtttatatttatttatccacgattacatattaacaaaacataaatacgagtgtatatcgtaagattgtgtatgaacacatcgatctcaataatattttacgttttcaggttaagaagcgtgctttagattatcatggatcaaaagtggtggttatagattatgtacatataaaacttaggttttagggtttaggctttaaagtcaagggctagggtttaatgtctagggtttaagatttagtatctagtgtttacattttaggatttaggctttattgtttaggatttcgcgtttagtttagatgatttagggttttgggttgaagaatcaaagttgtctacaatgatttagggtttatggttacatgtttctcattggagattatatattccattgttgtccatatggattggataatatggattttctatctcaatttgtttatatttaggggatttatgtttaatatttatggacaacaacaagaagttttaaagtgaagatcttagaatttagggtttagggtttagggtatacgtgatatggtatatgtatattgttaagggtttagtctttatggtttaacaggtttagggtttaatatcaagggtttagagtttagggtttagggtttagggtttaggggtttagggtttaggatttaggatttaggatttaggatttaagatttagggtttagggtttcgggtataaatttaggggttagggtttaatgtttagagtttagtatctagtgtttagggttttagatttagtgttaaggaactatgattgtttacaatgattatagagtttattgtagatggtataaggtttagggttaattgaccatggtcatatacaattatttttgggtttagggttatatgcttcttgttagattatatatttccattttgatcatatgaattaaatcatatgaattttttatgttctcaattggtttatgtttaggggatttatgcttaatatttataagcaataataagaaggtttaaaatttagggtttatatggtaaatggtatatgatatatttctatggttaagggcttagtgtctatggtttaaagtttagggtttatggtttaggtgtttaaggtttagagtttagggtttagcgtttagggtttaaagtttagggtttagggtttagggtttagggataagaggtttaagcttaatatttatgggcaacattaagaaggtttgggatttagggtttatggtatatggtatatggtatagggtatacgtatatggttaagggcttagtgtttatgggttaaagtttagggtttagggtttagatatagaagttagggtttaatgtatagagtttaatatctaatgtttagggtttagaatttagtgttaaggaactatgattgtttataatgattttagagtttatggttatatggttctcattaaagattatatatttcattgttgtccaaatggattaaatcatatggattttttgttttctgaatctgtttatgttttgatgatacaataaataatagtatgaataaatatagtaatatggatttcatgaaggaaaaaatgttattattatatattttataaaaaatgatttttaatcaaatagagaatgtcttaaattaaataaaaattaaataacaaaaggaagagagagaagaaattgacaagaaagataagaaagtgatagatagagaaaatatgttttatttatttaaatttgacggtcaagattaaaagagattaactttacctttcaattcgatggacgagatgattccgtcaaaaccatttcttaaccatgctacttgatttaaggtgaagagaataaggggtaaactggtattgatttttttaaaatagtgaaaaaactccaaaaaagtgtctattctcttcaatgtgccctaaatgcactaaaaacttggaaaatgccccaatcatgaaagaagcccaattttttctgacgtaatatgtggcgacacagttcataaaccgctcgataacactgctcacatgcgaccgaaacactattcatcagatgatatagtaaaacatcatatgatttaagcatttatctatttgttttatatgctaaaaaatatgatatcgcgataagtttacttttaaacaaatcttttatcgacctagaattgaaaattaatatatttttatttatgtaaatatcagttcaatttaaagaattagtttatttcttacataattaatataatagcagttaaaacaacatgttatataaaataataacatgctaacatatttaatatctagataatatttgtatgaacgtgccatctcaatccacgttttcattcacgccacctctttttttgtcaactcaccaatactgattttaatatctttgtttcgatttgattttatgtttccattattattcttatagttttgtatcgtcagaaattaaataaaagagaaacaaaagaaagaaaaaaagaaaagagagaaaaggggtaaaagagtcaaaaagaggatgataaaaagaggataaacaaaaaagaggatgatagtgacatgtgcacagtgatcaagtggtcaacctaattaatgagtcgttcatgtatatctattgatattaccctaaaatttaaagatgtgattcaactaaataaaataagtttattacaaaaatataaactttttattaccttctaaattcacaaaaccacgtagtcaatttcaagtataaagcaaggttttgacaatttttagaataagacaattttttttacaaagatttaaccacttacatccaatactaaacgatgattttgttactattgtggtgattaaaatgctaaacacataaagacgctcataacctccatgtacgttaaagacatcaaatctaaatatttttccaaatttgatgttgtgttgtcaaaaccaagctggatgctcctcttaacatcaaagagatcatgtatgatatagacatactaaattaaacaagtatgattattatactatgaacttgaaatgtgaattgatttaagaatttacacccacaacctcatatctatcccataactagaatggtaatgtactaatcccgataatttagcaaacttgaattaaatcttcctagccatctcttctactctcaaatcactaataaggttcaaattaccctagaactactctctcatataagagatcaattgcagtatttaaggatcgaattcacaaagttcttttgttcaaacaataagttgaatgtcgagattaagctagaaggtgatgattgaaatagtaataaaacaaagtaagataacagcaggttgattgtgttgtaaaaaattaggaaaagaggtaggaacagagtattctcaagaaactattggttagtagatctaatgaaagctaggttgttatcgaaccattcttaaactcaaaccctaattatggaataaccggtggctttagtaccccgcgcattgaccccaggcaagaaagaagggcaagagaagaagaagagagaatggtgcgtgaaatgaaaggaagggccgagtatttataatccgcggaagctagagtagagcccaagtcttaaaacgtggagccgaatccattcgggcaaagccgacttggtgaccaagttttgtcctgagcaatgcacgccaactttagccaacttggtgagcaagttttgtcccaaagccaacttggtgaccaagttttgtcccactcctcatatccgaaccttgagcctataaatagaaccttacccccccccccttagttacaccttagaagctttcgcaccaaaactctgcccaaaccgagagggagagagagaaatcatccgaacccttaacccgagagagagagagagatcgtccgaaccttaaaacccgagagagagagagagagtctgagcaagagatcgtcgagccttaggatagtccgaaagagagatcccgagtagaaaccatcggtcgagttaggaagattcatcggtgattgtgagttccggtttttgttttgcatgtttgattttccttcttgcatgttctcgattctcccttctcttagttttgttgttgttatggttgagtttgttgaggttgttaacctaatagctaggatagttgagaccgaagcaccttgccctataggagtggttgtgttagaatagcaccattcactttagagggatggttgcattgtcaagacactactcgctagtattcgggagacatttagagagaactttatgaacatgtgcgttgaaaacgaaccgcatgtttcatagtgttgattggaagatcgtagtgtgtggagcttgaagagtatctaagttaactccataagcatgctacggtcaagtgggatgtatctgacctttccttgtgattctgttcgttcgtggggtgtgcttgacgagatgcaagtgacctcaaggggttcaaaggacctatagagactgggttagctacccaaggcccggtgtcgcttacacgatggtgtagccaaggtgatgttccagttatatgcatttgtggttataactagggtgttcacgatgtgttgaggaaggcagtgcattcgggtcctaattaaaactttaagaaacgttatcttcttgttgtgttgtgtgttgcttacttccttctttgtgtactctgattatttatgttatgcatgtgggattatgggtggggattaaactaatgtttccttagggaacccgagctcattgagtaatgctagattactcatgactttacttgttttgcatgaaaccttagaggggattagagggagtggtgaacactagggaacccggagtagtttttcaatgtccttttgtaaaacttaaaatatgtattttcgtatcgtgtacttttggacctcatgccttggccacaaaaacgatgtttatgttgtggtttttccttgtattttcgtaactctaaaataatgaaatcggtatttattttagagtatacgggtttcaaactgataagactttgtccgagtcgacacaacatttgggtgaagtgagggttggcaagcctaacactacaaaaaaatttgaatattcttacggaaaaattgcgaccattttttcgtcagaaaattgtaaccattttcttacaaaaatgtgacgtatttatttagtcataaaaacgttactatttcgttataatattatgtcttaattgaaagtaactaacgtttgtcactaattatattaaatttgttacgaattatatagtcataaatataaatacggatttgcgaccaaatatggtaactaaattatacaataattgtgactaaacttatgtcacgtatagttacgagagttttgtaactatcatgtcacaatttgtcactgttttagtgacttttgcgtttggtcatagattgtgacataattattaccaattttatcacaaaaataaaaacatgtgaactaaaagtcaaataaaaaaacagcttcaattttggaaagaaaaaaatctgataatacataaaattttgaaaagagtataaaaagttatataagaaaacagtttcaatttctttgttattttttctttttatttccaatgctttgttttaaaaaaaaaaatcccacgatctctcttttgcaatgcatgatctccaaattaacttcccagttttattaattattttcatcaatttcactttctttaaatcaccatatatatcccacaatcgatttatctcaattgttcttccattcatcccttctggaaaaaaaaactgtaaatacttttacggaatcgtcattcaacaccacgaattcatcttcattgttcgctaaatccaacattccacgactccgatcgtcttcttcctcctttcgtaaggtggtttcagtaacccaaatcaccacaaaatctaatattttaagagaaaatctttgttttgatttttttgatgtatttagttgcaggcactactgtttgcaacatgaagtcaaaatccccttctttttatatctccagaaatatgaacagttaatgctaattaaaaggtgtgattctgcttcttctaatgtggatctttttgtctaatttagatacattatataatatctaccctatttacatcctattctctgtcagctatccacctctacgtccacacttttgttttgttggagcggcatcaatcgttgattatatgtgatcttcatttaaggacaaaagttggaatatcatcatatgcttcgatcatgtcaaagaacccaaattaaagaagcacaatcaaatgatcaactgcttgaaggagacaccaaaagtttcgtcatcaaagaagaagataattgagtgacaaagaagaagtcaggtgatgagaagcaagagatgttcaaagcatcaaaaggccaactcacggtttcaataaaacattacgaaaagtaatggtttttgtggggggttgacattatttgaattcattttcaccctttttatttgttcaaagtttaggatctaatatgtagtatacaaaagcaaagaatcttgatcatcaatatatagacctattttacgttctatttttttaattacaaaactccaataagaaaggagtaaatgaataacgccatgtcaagttgttttaatttctggatatcactaaatttagttttatagataattttaatatgttaaaatggccatgtaacgggacagagcatgacattgtgtgactataatcgagtcactaattgtgttggatttgtgattgtattttggtcgcataatataacgggacaatgacttaaaaatatgagtagtaataatctgtgacaagtatgttacgattttatcgccactagttgtggcataattgtgacagtatcgtccgccacgaaatgtgtccatttttgcgactatattaacgtcgtcacaattagtaacgaattgttactattgttaatcgtcacatttgtttgtgacttttttgagaccttcatggatttgtgacgattttattgtgacattttaaatttcgtttcagtttcgtcataaaaaaattattgtgaccaaatatttttttattgtgacgttaatcatcgtatcaatattcagtttttattgtagtgtaagtggatcccaaatggggaaatgggtaaccttgagtgggtaaagggtcggaatgtgtttttgaacctcagctactctatgggaattcatttccattgtggcgtctccgagccgtgccgactggccgagttctagcgcggaccgggggcgttagaatgggtggtatcagagcatggttttagggcttttgggatccgttttttttttcaaacgttttatcgagtaaatagtcgcaaaaggcacttaggataatccgagtcgttcaccactattaggataggggggaaatattagatacctaatatcgttgttggattggatgcagatgtcaaggcaggtgtcggacgagaactagtcgagagatgtgatgtctagtcgtggaaactttgcgcagtatccggagtcggataactagataccgagtgagagtggtgagataaatggagattatattcacttggagccgtatggattacctgaatgggaaacccccgattccacgcccaggcactcgtcgcccgtatcgatgttcttcgatacatcaaatgagagttactttcgttctcgatcacataaccccgtacaatccccatcgatcgagcaaaaccatggaaaccctatccctgaaaccaagaaccaaggagccccgaaatgcagcaaaccttagacattattcagagtcaattgggtcatatgattgaaacacaacaacatcaacaacaaattcaagaaagccagcgagaggaatcaacatccgcaaagttcctgaagctcgtgatgatgatgagagacttaggaattcgcgtgtttaaaggagaacataacacggtcgtggcagacaagtggctacgagaccttgagatgaattttgagatttctcgatgtcctgacaatttcaagagacagatcgcggttaacttcttggacaaggatgcacgaatttggcgggagagcgtaactgccagaaaccaaggccaaatgatatcatgggaagcttttagaagagaattcgaaaagaagtactttccaccggaggcccgtgatcgattggagcagcaattcatgaagttagcacaagagacaaggagtgtctgagcatacgaacaagctttcacgcgactaaggaggtacttatataacggacaagatgatgaagcattgatggttcgcaggttcttgagaggactcaggctagagatatggggacgactacaagcggtcaaatatgacagtgtcaatgagctaaccgaacgggcagataatgtggaggagggtattgagatggagaagagtgtaaccaacaaggaaaatgattgatcgggagggaggaagactaataacgcgtaggccaaaaacaacgctcctaaattcacaccaaatcaggagagagacaatgatcgaggaagagcaagagcgaacttcacaaggtgtttcatgtgtctcaattaaaaagacatgtacccaaacccgatgctgtaatttcagaatcgatacccgaattgaagaccaacctcacatatccggaggggccactcgagatcggagaacggcgcattcgaaagtttaagaagcggttaattcctcaagttcaagtaatttgggaaaacaaaaccgacggttaattacattggagggtgaaaaaaagttccgggcaaaatatcctcaactgttcgacgttgaagaagaagatgacaatgaagccagtccatccaatactcagggaatttgggacaaattcctataaggagggcaaatgtagtaccccgcgcattgaccccgggcaagaaagaagggcaagagaagaagaagagagaatggtgcgcgaaatgaaaggaaggacgggtatttataatctgcggaagctagagtagagcccaattcttaaaacttggagccaaatccattcgggcaaagccgacttggtgaccaagttttgtcctgagccatgcacgccaacttcgagcccacgccttagccaacttggagccgaatccacctgagcgagccaacttggtgaccaagtttcgtcccaaagccgacttggtgaccaagtttcgtcccactcctcacatccgaactttgagcctataaatagaaccttacccccctttagttaaaccttagaagctttcgcaccaaaactctgcccaaaccgagagagagagagagattgtctgaacccttaacccgagagagagattgtccaaaccttaaaacccgagagagagagagagtccaagatagagatcgccaagccttaggatagtccaagagagagatcccgagtagaaaccatcggtcgagttaggaagattcatcagggattgtgagttccggtttttgttttgcatatttgattttcctttttgcatgttctcgattctcccttctcttagttttgttgttgttatggttgagtttgttgaggttgttaaccgaatagctaggatagttgagaccgaagcaccttgccctataggagtggttgtgttagaataacaccattcacttgagaaggatggttgcgttgtcaagacactactcgctagtattcaggagacatttagagagaactttatgagcatgtgtgttgaaaacgaaccgcatatttcatagtgttgattggaagatcatagtgtgtggagcgtggagagtatccaatttaactccataagcatgctacggtcaagtgggatgtatctgaccttgccatgtgagtccgttctttcgtggggagtgcttgacgagatgcaagtgacctcaaggggttcgaaggacccagagagactgggttaggtacccaaggcccggtgtcgcttacacgacagtgtagccaaggtgatgttccggttatatgcctttgtggttataactcgggtgttcacgatatgttgaggaaggcagtgcattcgggccctaattaaaactttaagaaacgttatctccttgttgtgttgtgtgttgcttacttccttctttgtgtactctgattatttatgttatgcatgtgggattatgggtggggattagactaacgtttccttgggaaacccgagctcattgagtaatgctagattactcatgactctacttgttttgcaggtaaccttagaggggattagagggaatggtgaacactagggaacccggagtagtttttcagtgtccttttgtaaaacttaaagtatgtaattttgtatcgtgtacttttgggcctcatgccttggccataaaaacgatgtttatgttgtggttttttcttgtattttcgtaactctaagataatgaaatcggtatttattttaaagtatacgggtttcaaactgataagaatttgtctgagttgacacaacaattgggtgaagtgagggttggcaagcctaaatggatcccaaatggggaaatgggtaaccttcagtgggctaagggtcggaatgtgtttaaatatgcatttttaatgagttcgtttgttcaccttagtagataggccgattcttattacacacctaaaaaccagactcatcaaataatagatccaactacatatacttatggtgggcatatctattgtctggattcaagatctagttagttactctagatctagcattaagcataattaaagatgaagaattctacagataacctagcaaagggggcaatctactaaactatatgaatccctaatgagaaaccctattcctaacaagcagattactcagacatattgattgaaggaaacaacataattgagtatgaaaacataaacacggcaaatagatttaagggaaagaagggatctcttcactgtattaggaactgaatcaatctctgaaaacactcgatgaatagcttatgtctctcagtaacagggtttgcaaaaagcttgataaaaaacttgataatgaaaacttaggtctaaacaatgtatatacaccctctaaaaacgtctagggactaataatgtaaatagaaaagttttctagggcaaatttcctcttctgtaaacttgaaagcgtctaggactttgctgggccgaaactggtgtcgatcgacactaggagtgtgtcgatcgacactcctcttgattcgtgaaaccaaagtcgtccttaccttactttttcttagcttttgctccaaaatgtctccttatctccattgttgtcccactgcatagaatacctgaaaagacactaaaaagactcgagaaataacataaagactcaagatcctatacctaaaacatagataaaatcagttaaaataaggatatatcaatcaccacaatctacatattcaatttataggaagttcaacatttgtagtaggatcctcactctcaccttctttatctttctcatttgacttatcttgattctctatttccatgttgtcctcagctggttcaaaagtacccaaatattcttgctccacatccgtctggtcattctgctttctctttttgggacgatccatttacttcacctgaaaagttcaatcaaacataaataatgaagaagccagtcattagccatttaaatatcatgaagtagaacaaggtcaattttctctctctacaaaggcaatttattagaggttaggtctcggccgaaagggcctttgcctgggaactcgaagtttgtccgactggtagccagttcccacctttccgtccacactggttctcacacttgttctcatccacatgtggaagtccgatctactattgggaatccctcttcgattgctgtttttgattctcttccggttgagacgctgggaacctcttcccctattcctagaattgttgaatttccctttagtgacgaatctttaaagactcctttacttgccgttatccccttcgacgacaagctctcttcgataaaacattatgtttctggcgaaagctcctccgatttggcaacaatgtctgagaactcctccactatcgtcagagagtctgatttggtccctaattctcgtttggtcgaggcaaagggctattccaccctatcacctaacgtgggggcgtcaatgcctatcgatacctctggcctgagccacgctgtaccttcgtccataccctctgagcctaccacaatatctgagaattcctctgctgcggtggatacaactctcctgaaaaatcctgctaacactggatcaagctttcccactaattttggtgccactgccactcctcttccggttaacaatcctcctcacacttccgctacccttccatgggcgaagaaatttaaggcctcgttgctaaaccttaagcaaatgtccagcccaacctttctcgatgatggtacccctgttgttgttgcgccaccctctgtattactgaagacagcagagatgtggaaaggccatcttatagcccaattttggggcctttgtccaccggattcaaatatcttcaatgatcttaatcttatacgatgaatttatggcgccatcacggttcgtattatctcggaaacagcttctttgatctacatctcgtctttggcaacgcgagaatgggtagtggatgtggggtccttgtacagtgtacccttggtatccagaaggccctctagaactcgaagaattacaaacggctcctacttgtacaattctcaagaacgaccttccgtagttgtgtttacttgatggaataattgttatagcaactggaattggcgagcccctgcatagagagcctttcttcacatttactcgacctcgtggtcgagtacctcagtctaggccactcgatgacaccactcgaccacgaggtcgagtaacaccttgccataccactcgatcatcacacgaactgtcactcgatcataacactcgatcacaacactcgaccccgatcgattagattcctggcccatcccttatcggtttactttgttttgtataaataagtcttcaagaattttgtcccaaaacatttaggttttgcttcacttttgatttctatttacctagtttattctatcattgcgccgtttgctctacacacttgtaattcgagattttccatgttattcggattctacatttgattttgtttagcacctagtttctctactctttatctctttatatatgcagtctacttgtttattggcaattatgtttttgagcatgtaatctgaatagtgacttagaatttttaaggataggatagaatggttggttgatctgtagtctataggatggttaagttttagaattgattgaaacccttctggattagttgtgtttaaggcttatttctctctgataaattggaattcgatccaaagcactcccgcacccagaaggtgttcgataaatgcttgatccactagatctagaggttttcgtctctatcccaagggattggccgtttagagcgtttattgactgtaataggttgaatcgtattgcctgcatagttagattctgttaatgggaattagtttgtgctagctttgcttgagggtttctatcacgatagtgaattaatatgttgttgaacttgttatgtagggatagcttgattgcgctttgttaaccatatgagcaggctaaggagaccactccatttgattacctcatccttaagaatttctcgtccatttgatttctttatttcattgctattgtttaaccatttttttttgtgttgcttagttttcacattttctacctattattaccaacttactcgaccacacccaatgtgtggcagtagattgtgcggtcgattatagttgttataatttctgtttgttattcgaacagttactggacctgtccctgctactggcttcaaccagtcgtggtcgagtgttttgtgtaattctgttagaatttctattttctacatgttcacttaggactgctaaaaactccaaaacctgctattgcttggcttgacttagtggcttccgatcacatctcatctgtttgcatcacacctaaagtggatttacacctaaaatactacaacgacacgatagtgtttaaggattaattgatcttaaaaacctattatcaattttgtgtcgttgccatttgggtgcttgtttgctatattggagatttcagaatatttaagatccagttctttttcgtttttattcaacgttactaactctgtgtttttttgtttgtctgatttgatccaggttttgcgaatcactagctttactcaacttcctctggaccgtgctaacgtatggttgttgctcagtgcatgcaaactcgatcgcaagggcatcagaacctcctttttaacgataacatgaaccgtattgctcttgaattaagggaacaattaaacacaaacgctatggctgatgaccagaacccagaattaccaaccaacattggtgcaggcgatgcaccatgcaaccacaatcaccgtaatggcatggttcatggcaacaagtttcacgacctcccatgaaggatccactcgaccacctagacgagtttgataggctctgcagcctaacaaagatcaatggaggcaatgaggatggcttcaagcttagattgtttccattttctctaggagacaaagctcatcagtgggaaaagtcgattcctcaaggctcaaatgattgcaagaaagccttctttgctaaattcttctcaaactcaaggactacaagactccggtatgagatttttggtttcacccagaaaaatgctgagactttctgtgaagcatgggagcgcttcaagggatatcagacgcaacgtcctcatcatggtttctctaaggcatcacacctaagtactctctacagaggcgttcttcctaagatcaggatgctccttgatacaacatccaacggaaatttcctgaacaaaggcgttcttcctaagatcaggatgctccttgagaacttagcttagtctgatggcaactataatgaagcaccgcatggatatgaaagctagaaatgacaagctggataagctaatcattgtgcaatagaagcaagtccattttctcagtgaagatgagacatttcaagtccaggatggggagactctccaataagaagaagttagttatgtgcaaaatcagggaggctacaacaaaggtttcaacaacttcaagtagaacaatcctaatatgttttacagaagtagcaatgttgcaaactcgcaggaacaagtctaccctccatagcagcgaatcaacccaaaccatttgttccatacaactagggtcaagggtttattcctaaggaactataacagggaagctatcaaccgcaacttccaccacctgggctcacaaagcagcaacaacaacatgcttccacaattcgagactcagacttgaagaacatgctctagcagattttccaaggacaagcaacatgagcaatggatttggccaaaaagatggccaaaatacacaacaaggttgattgcactttgaatgatctcaacatcaagattgaagcactaacgtctaaggtcagatacatggaaggccaaactgggtcgacctgtgctcccaaagttacaggacttccaaggaagtcaatacaaaccctaaagagtatgcgatcgttcacgccatcactatctgccaagatcgagagctacccattcgtcatgcctctaactcaatcactgaggaaaacgaagctcaggaagggcaggtttctaatcggattgaagtcttagttattgaacttgaccattcagctggatctcgccatcaaattctgtctaccttagaagagaaagtagccatcattgagagaatggtaaaacgatccaagccaactccattacctccacttgttcttccaaggaagttcaggaaagcttggatagagaagtatgaatctcttgtataggaacaactcaatgggatcaaagcagtgatgtcattaatataagttttcgagctgattcaataccctcacaaagacgtgagaaatttaatactagaaaggatcaagaggtatcacgattcagatgatgaatatgatgccactctgtttcaagctgctcgtgaaaaaattgttcaagaaaagttggaagattctggatccttcactctgccatgctctatcatgcatttagctttcaacaattatctatgtgatcttggagtttcagtcagcttaatgccactctctatggtaaagaagcttggattccttcagtatatgccttgtgacataaccttgatttgctgataggagttcaaggagaccttgacacactaagtcaaattcaaggaggagattaacctcgactcaactttgatgtcccttcagtttggtttgaagtagactatctaccagatgaggaagcagcctacttagaggaaaaatgaattgaggactcagttgcgcagctatcaatggaggatactgagaatgatgataagctcgatgaagaaaaggacttcttaagtcctttctgtcacactttccctgcctaataagtgtgagtactcaagctagagatttaaaacaaactcacttgggaggaaatcctatgtctatcaatgtatatatcttttattttttccttgttgtctttgatgcattttgttagtattttcaggagataagtataaagagttaagtgaagtgggttttacctctgagtgtgcaacagaacactcgaccacatcctgcaaggagcaagtgtatctgtgtaatcgagtataaagagggtttcactctcaagattttgaagtttcaacatgtcactttatcacccgaagccacatgctaatgaggaaatgtggtcgagtatatgtgatgattttggacctaatgtttttaaaaatcatcactatacttgaccaacagaagccatatggtgactagaggatgaatttgagtatgatgttgttttgatccaaaaattcaacattatactcgaccaacaaaatctatagagacttacagaggcttaatcaagtttacaggggattgcggaatgttctgagacttttctagtcaacagggaaccgtgtttaaagacaagaaaacagacgtggggttcaccaccaaaacttaatgttccccatgcctcccaccaaaagataagaaatccatctcttttgcttctccaccagatgtcagacgggccgccctgcgcccaaacgggccggcctgcgcccaaacgggccatccgcaatgtgcccgattctcttctgattcgcgacggacctgccggccgacgaccgcggtcttgaaaaacgagccctaacccgccccgcaaagcccagcggttagacaggccggcccgcaggcatatatgaaaaagggagtcaaatatatgccaagagaattgtcaccttgacatctatggaaagaaaattgtcaaaacatatagttagggccatcacaattctctgcgtttacatgtccaacttcatttgaaccacgagcattttgatctatacttaaaaggcagcatgtgttaaaacattgtacagaccacaatagttaactagatgtcaactccaagacaaattcacgtttgtgttactggtaaaaataaaatgcctcgaatactgatgataaaaatatttcaacttcatcacttggttggtataaaactagccacataccaggttcatgtgagttctctgtgatttcttctatatgatagtaggtttttacggtcaattaatcctaaaatactatcctgtcgttgtagtattttaggtgtcaatccaaaagggtgtgatgcagacagatgagatatgatcagaagttgttaaatcaagccaagcagaatttgattggttatctaacagtcctagtgttgatgcaaaaaacagtaaaaagtcacagaaatgactgatatactcgattgcagggtcaactgccagaagggaccctgttagaggtgtcagacgggccggcccgcgcccatcttgcccgccccgcagtgggctttctttttccggccgcggcggtcggcccgtttaggaccgcgggcaaaaatatcagtgtccaagcccggcctgcaaagccagcggatatacgggtctgcccgcgggcatttctattcacttgtttaaaagatgaatcattgaatacaataatgtctaaagaattttgattcaaaccttttattcatgtataacaatgtacaaactaatatggtacaatgccttttatgagttaccttttacaagttctgaattgtgaatcattgattaaaacatctagttacatacttacatttgacatctcctttaactcaaacgatgacatttatttaaactgaaaccaaacataagtacttaaacatagctacagttaactgaaacactttttcatttacttaaactgaaaccaaacataagtacttaagtatataagactgaaacaaaacataactacataaccaactaaacaaaaatactgaagtgaaactaaactaatgctaaaaagagaacctgcaactcatattcaaatctgaaattcaaactcaatacgtagaacaaatatcaatcctcaaaccaaacataagtacataactagctaaactcaattcaaaactgaaactaaactcaagctaagaatagaacgtgcaactcatatttaaatcaaaactgaatgcaaactcaattaaagacataagtgaaacagaaccaaactgaaacataaattttaaacataagtctgaataaaagaacttaagtcgaagagaaaaacctacaacatctcaaagacaaacagaaatctgaagtaaagtttcaaactctaacagaaccttaacttaaactcaaatccaaatatcccaaaaggaacaatgtcgtgtctcatcttgcaactcatttgtaaaccttaatctgaatttaaactcatattcaaatcttaaaatcaatgtagacttaatgaaagatacgtagaacaaaggatcataaaaacagaaccaaactaaaacaaaagtcaagactgaaacataattgtaacaagttaaactcaaatgtgaaacagaaaatgaacttaacaaaataaataaaaagtatatagagggatagtcatgggacttcctcccaagtgagcttgtttagagtctctagcttgactcctcacactaatcaagtggagaaaatgtgacagagggaacttgagaagtcctcctcttcactgatatcatcatcatactcagcatcctcccttgacagttgcacagctgagtactcaattcttctttcctcatagtaggctgcttcctcctttggaggatagtctttctcttctgaccaatctcaggtgatctcctttcttgaaatcgtgtcatggttgagctggggctgaacctccttttgcattcgacttagtttgtctctaagcttttcaacagtgtagctcagcttctgaatagttctgttctgcagatcagtcttccttttgagttccagccaatcaagtgaggagggtatactcgatcaagtagtcgagttcgatggcggagtttgaaccaaaatttgctccttcgctcttttgatctcaaggccttcacttggaaccgctctctggacctctaaggtttttccttctattggtggccttgtcggaaatttgttgatgtcaaactgtaacttgacatgcctcccaaggttgagatcaatcttaccatatctaacatctattattgctcccactgaggctaagaaaggtcttcctaagatcagtggatccttagactcttcatccatttcaagcacgacaaaatcagtgggtacctcaactccatctatcattactggcacgttctctagaatgctgaaaggtctccttgaagttctatcagcaaggatcaaggtgatgtcacatggattgtactgaacgaatcccagcttccttgccacagagagtggaattaaactgactgaggctcctagatcacatagacaattgttgaaagtcaattgcctaatggaacatggcagagtgaaagatccaggatcttccagcttctcttgaataatcctctcaccagcggcttgatgcataatgacatcgtcttcgtcatctgaatcctgatatatgttgagcctttccagtatcaggtttctcacatctttgtgagggtctgaaatcaacttgaggacttctactaagggcatcacaacttccatctcatcaagttgtttttctgctagagattcatatctgcttttccaagctttcctcaacgtccatggaagagcaagtgagggtgatggagctggcttgaatcgttttaccatcctctcgattatagcagtcttctcctccaagtcagactgagcctgatagaaagattgagatgaatagtcgatctcagcaacagagacttcaatctaagtggaagcctccccttcttgaattacactgtcctcagtgtttgatgtagagacatgttgagttggcagctttcgctcatgtctgatagtgattgcgtgtgcagtggcgtactccttagggtttttgattgcttttcctggaagctggcctgggttgtttgtaacaggtggtgaagtagtgatgccgtccagataccgtacccttgtgttcaatgattccaacctgctactcagttcattgaactgtctgtcaactttgttgtttaagtcagctagcttcttagcagattccattacccctgcggcttgaccttgcatgatctgttggagcatattcttgatgtctgattcctggggtgtagagggctgatgttgttgtggtgtgaaaccaggtggtggctgttgctgttgataccctccttggaactgttgcttaggaacgaacccttgactttggttgtaagtaacaaacggtttgggttggttctgctgcagctgctgttgagggtaaacttggtcctgaggattggcgacatttgtgcttctgtatgacagatttgggttgggtctgtaattgttgtaccctttgttgtagccgccttggttctgaacataactgatttcagcgccctgatcattctccccctcttggatttggaattcttcgtcttcagaggcgaagtgaacatgcttctgctgcactttgaggagtttgtcaattttgtcatggagagctttaatctctcggcggtgcttgtcatcagattcagtactggtgcggatgcttctgtcataatcctcgttgtaattgcaatccgactgagccaagttttcaactagctcccatccgtcttcgacatccttgttcaggaaattcccattggaggcggtgtcaaggagcatgcgtatcttaggcaggacgcctctgtaaagtgtgctgagaagagatgcttccttaaatccgtgatgggggcatttggtttgataacccttaaaccgctcccaagcttcacagaagctttcattttgcttctgagtgaatccggatatctcgttccagagtcttgcagtcctgaagttggagaagaattttgccaagaaggtccttttgcagtcatcccaggtcgtgattgatccctggggtagcgtcttttcccacatatgggctttatctccaagtgaaaatggaaacaagcgaagcttgaaaccatcttcactaactccattgattttagtaaggccacagagcctttcaaactcgtcaagatgatctagcggatcctccattggcaggccatgaaacttgttcccctgaaccattgcaatgagaccgcttttgatctcaaagttgttgttctgtattggagatggaacaattccatgacgctggttgtggttgtgagggaagtcaccagcaccaatgttggtaggttgctcttgctcatctacaacgtcagccattgtgtcggtttctgtctgttctcttagttggcgagcaatacggtagatgttatcgttgaataggagattctgatttccttgtgaccgtgtatgcatgcaacagatagcagccgggctataacagacgaatcagagatgcgtctggaaagcgggttgcaaggtacctgaaacacaaagacagaaaaggcacaatgttagtaacttgtgtaacaaaaacgaacctgatcttaatgtttctaatgatctcaaatatagcaaacaaacatcaaactggcaacggcgcgaaattgatagtaggatttttgtcaattaatccctaaaacattatcttgtcgttgtagtattttaggatgtcaatctaatccggtgtgatgcaaaaagatgagatatgatcagaaagctctaagtcaagccaagcagatggttggttggttctaacagtcctagtatgcaataacagaaatgaaatgaaactaaaagcaggaatggcaatagcaggcaagtgaatgacaaagcagaaatgataacaggcaatcaaatggataaacgattcataaggatggggtaatcgaatagtatggtctaattaatctattcaggcggttgacaaaacttcacagaagctatccctagacaacaagttcaacaacagattaattcactcccgtgatagaaatcctcaagcaaagctaaacactgacctaaatccctttagcgatctctaactaagcaggcattatcgaatcaacatgttaaagtcaataccctctctaaagccaatcccttggggtagagtcagatatctctggaattaataggatccaacgcccattaaacgtcttctaagcgctggacgtctggactcatactccacattagccagtgaaataagcaataagcgcaactaatccagaagggattctagttttctaaactcaaccacctaaaacgaccaagtaaaccacaactattctatcccatcctcagaaatacagttcactactcagacataatcaaagacaataacaaagcaacaattgaaaacatgataacagaaatgacgaaagacttaaacgaaaactgaatatcaaatacttgaaaacgaaactacaaagtcgcagaaaaaacactgcagctatcaaagttgcgaaaatgtaaaagcgagataaaaacggataatagcggataatagccgacgccctagggaaaaccctaagaggcagtttatataagcgagaaataaaacaaataaggaaactaaatatatagcgaatcttcacgtcatgatcctgcgaccgaatatgtcattggcatctaacgggcagaaatgagcttcctagtgatcgaatatgtcattgatcaaactgggcttcaggggctccgtcttgcgaaatgtagtgaagtcgagattgaatggtccaacgaccttgtgatcgagtgcgatcgagtggatgtcatgagggtgtgatcgagtggtttcttcggcttctcttctcttctttgttctcagcttgtctggttgagtgcagaatgagcagataggcttcctggtgatagagtggtgatcgagtggttctgatggggtgattcctccggcttcgcgattgagtgaaactgagctgcttgcttctccggggttgcgatagagtgatttgccctggcagggctccgaggctgcggatagagtacttttttctgaaggcgtcattgggcattctgacttcatgttctgtataattaacttaattaatactaagtataattaactaacctcctaattaacttaattaatatgcggataaactcggacgatcttatccatacggaatagataggcatgaacgaacttatccatattcgttcctatctacttctcgtagaaccgtaaccatgacgggttcacccaacgcatcaacacattaatctcagtcacccaagtctccgttccactcgactcacccatccggttccccgaccacttgctcatgaatatctccaaaactgccagaccgttggtccgacaaacaatactcttcccataaggactttttccgaccgttccgattgtacggcttgctaaatcatcgagtaaaattcctcggcctagtcctagtcctggccaggggtattacaatatctatcccgacctttgaaatcatatagccgcttatagaatactttctcctcaggctatgacaaagaaaaaggtgcaggtggaagatagattattttacctcttttaataggatgtaaatcttttctaacgcaaaaaagttgtaaatctttgcgagtctttaacccattctttggtttcccacagtgcaacaatgcttgcacacacaattctcttaacatgtatgacattgaaactgtgtttaactgccagatcttgaaaaataaaataaaagtaaatatagataaatgctaaactttgtaagcatcccagttacaacaatactattcaaagagatcactatagaaacattcaataaggcaacttgaaaaagatagaccttttcttcaaccttgatggtcttcctcgtcgttttcttcctcttcctcttcctcttcatctcattcactttcttcactttcatcacatgaggctgtctcaattacagtttcagtcctagctctcttcttctctgtctctttcctattcccaaaatcaattttgaattttttttaagaggacatatatattatgactagttaatattttaaccttactctcatgttcaaattttcaatcaaaccatgttttcttcccctgataactgtgatttggtggtagaccattgcgatgacacatatcaacatgctttctacctttacataatcacatattgtcaatttttcctacgtaaaggacaacccatcttaccttttactttgcatactacaagatttccatatagagggaaatcattgatagtccataggagcattgctttagggttgaaagtactcttactgtaggcatcatatgttaactttccgttgctccacaactggataagatcctctttcaggggttataactaaatatcaatgatattaccaggttaatgcagccagaaatcaacaaggtaagcattagcagcattatgttttcttttttcatacacaggtctcgagtaatattataattaactagttatatgttcttttttaatgcagcaaaagtagggtatttggcatttacttgcttccgagtcacataatctacagggtgaaaaaaatttccgtcttattactaaaatggcaccttaggtcattggcttgttgctcagacctaaacattctctttagacgtggtataattggaaagtaccttagaatttttctgtgaaacatttttctttatttgaccagtgtgcatgtttatcttccatcttctatctagaagctatgcatttaggacatgcgtcaagcttcttcagccttttcatgaatagataatgattattaataaaagcatgaatatcttttaataacctatatcaaaagatttcaggaacttcttcacatcatacattgatgtatatagaacattatcttctagtaaaatgtttggtaaagtctcctgaagatcattgaagcttttgtctgaccacccattttgtgtctttattttatacagtgacacaattgtagaaagcttgctatggtttgcacaacttgggtataaaggagtttcacattgataagtctgcattttacttgtcttaggcatccatttcccatcactttagcatcctatcaccactgtttcataccatttcgcaacatttgtcatcacattgcatgttaaggatagttttgcatgcatattacatatttgtgttgttttcaggtgaattggagctgatggtgaactaattggaagaagtggacctgaaccgatcaacatactcgaccatgagctcgagtagtgtcatcatggactttttgaagtactcgccacaacctctacagctgatcactcgaccacgacactctatccaccactcgacccttaggtcgagtagaagactcaccacttctcacaaccactcgaccccgaggtcgagtagcagccatcaccatttctcaccatcactcgatccagtggccgagcatcaccatcatcaatcactcgatcgcacactcgacctcgtggtcgagtcccctcatcatcactcactcgatccatcactctgccaccaagttgagttccaccatcatccaccactcgacatcatactcgactgccagcttcagagtcttcttgattccgcaatcaacaagacactcgagcataaggaagagatgaagactttggctcgtcactcgacccactacttgatcacctgggtcgagtaccattcttaatctgttccaatactgtgtcgttttgagtattagggtttcagaatattttgctataagtagcatgtactttattttttcaaaaacaagtttttattccgcacacagtttgtgtgttatttgcttttgtaatccgaatttcttttaatctattcagtattcgctttttgtttattttactaagttgttcatcctgttatcatcatgttattactcttttgctatgatgttttcattcatgtcatcatttatggtctctataatgatgtctgagtagtgactaggtttctgaggatgggttatagtagtttagaatcctcggtctgttaggtggttgagtttgatttacagatcccttctggattagttgttcttaatgcatattgctttctgatcaactggaatttgagcccagatatttctgcacccaaaaggtattcgacgaaatgtttgaaccactaattccagagatttgtggctctgtaccaaggtattggttacagggagcgttttggctttaacttgatgattcctaatgcctcttaggttagctctcgtcaatggtgattgagtctcagactagtttaacttgagggagtctgttgcggtggcacttagatttggttatcgaacttattatctagggatagtttattgatcatctcaatcacttctagattgaggaaactaactactcgattaccccatcctcgggaatttcttatccaattgatttatttgcttacactgctattgttctcttgttcttattactcgttgcttagtttttgcatttcatacttgttatcactcatatacccgatcacacccagttgtctagtaagagattgtgcagtcgagtatctttgttacagtttctgcttgttactcgacctgtcactcaaccacacctagtgcttggcaacaagcagtgttggtcgagtgttttctttatcctactagattttctgtttcctgcatgttcacttaggagtactagaaactcaaaaacctgttattgcttggcttgactctgtgacctctgatggcatcttgattgttagcatcacacccatttggattgacaaccttcagtagtacaacaacatgatagtgttttaggattaattgatgttaaaaacctattatcaaacatcatctagctttgcaaggaactcatcttccatcttgtcctctacctcaccatcaaggtttatgagtttgtaatccattttcttgctattttgttacgaatttgagtttgattttttctgtagagttgtttatcttgcttagatctacatcatactcagtttacaatgatttctgggttttgtcctttttctaaattttgtatgatgatgttcttgagtgttcttgagtagtgttctctagagttcttgaatatgggttaggtttaggtggactcctctgtttatttagttagctaaggttataattgcatgattcccttcacgattaggagttcttagtgttatttcctttctgatcaactggagattgattttagacttttcacgcccaaaaggtgtttgatgaaatgtgtgaaccaacttattccagagatttgcatactctaccccaagagattggatgtttagaatgcttattgactttaatagattgttgcttaatgtttgctttgttatgtttcatcaatgagaattgtgattaggaagtggtaaagttatgaggatcattgtcacgagagtggattgatctgggttaatctattgtctagggatagcttgattgagtttgttagttagctgaaccaattactccattctaaagagctacgttttgattagattgatttaaacttcgtgctattactctttgcttgttgtgtttagttatcttgctcgacttatttacttgaccaaatttagtattatgctcggccgagtgccttactttctgtttaatatagtttcattttgaatctgatttgcatgataacatgttgcttggtttagtggaaataaaccaaacctattcacacttggcttgacttagtattctctcattgcatcatgattgttagcgagacactcatttggattgacaccttaaatactacaatgacatgatagtataaaggaattgatcttttggaaacacagtaaaaaccagactatcaatttgacgttattgccatatgggtgtttacttgttacatttaggatttctgagttattaagatcaagttctatttcatctttctcgaaactcacttctcttttcatttgcttgtttttatcttgtaagtactgtcatactccactagcacttcgagtgtaaggatcgaggaacttcacccaatgtatgcaaactccattcttaaggttttgacaatcttctgcggtatagagacaacatcgacatgattcagcgtaactgagagaacaacaagccacatcagatctggttgtgatggcgactgaagacaatactaatgagttgccaggcaacattggtgtaggagatgcacccataaaccatcatcgaagagctgatattgtcccacctcctattcagattaacgactttgaaattaagagtggtctgatgtccatgatacaaggtaacaagtttcatggtctgcctatagaggacccataagatcatcttgaaagctttgatatagtgtgtagtttaatcaagatcaatgggttcgtgaagacagcttcaagctcaagctattccctttctcacttggagataaagctcatgtttgggaaaagactttgcatgttgaatccatatgcacatgggatgactgttagaaagttttcctagctaagttcttctctaactcaaaaacagttagattgaggaatgagatctcgggtttcacacagaagcaatctgaatccttctctgaagtatgggaacactacaagggatacactactcaatgccctcatacttcacctattcgaaacatgacggctatgcttcaacaaaacctaaaaagtcaaactactagttctttggtcttggaaaaacatattattgagataaacactgattaggttcaaattaccctaagaactattatctcaaatatttaaggatcgaatttcacaaagtttttttgttcacacaatgaattaaatatcgagattaagctagtagggaatgattgaaaataaaggagaacaaagtaaaaagacagcagattaattggttgtaaacgattaaataaagagttaggaacatggtattctcaggaaactattggttagtagatctaatgaaagctaggttgttatcgaaccattcttaaactcaaactctaattatgcaataaccggtggtgttccgccaaactccctatgcttatagctaagaataaccggagaagccgagagatctttaacctaaacatgcattctaaacgagttcaattgttcaccttactagatagaccgattcttattacacacctataaaccaggttaatcaaataataaatccaattacagatacctatggtgggcatatctattgtctggcttcaagatctagttaatttctgtagatctaccattaagtataatcaaagatgaagaattctacagataacctagaaaaggaggcaatatactaaaccatatgaatccccaatgagaaaccctattcctaacaagcaaactactcagacatattgaatgaaacaaacaacataattgagtaacaaagtataaacacagcaaataagataagagtaagaaaggatctcttcactctattgaaaactgaataaatctctgaaatattgaaaactgaatgaatctctgaaaacaaatgatgaatagcttatgtctctgaagatagggattgcaaagaacttgataaaaggaacttaggtctaaacaacgacctctaaaactatatataaatcctataaaacgtccatggactaataatgcaaatagggaagtcttttggggcaaatttccacttttgtaaacttgaaagcataatggactttgctaggccgaaactggtgtcgatcgtcaccagaagtgtgttgatcgacactctgcctgaatctggaatccgaaatcgtcattagcttccttttccttaacttttgctccaaaatgtctcctcatctccattgtcgtcccactgcatagaatacctgaaaagacactaaaagactcgagaaataacataaacactaaaaatcctatacctaaaacgtagctaaaatcagtaaaaatagagttatatcaactcccccagacttaggttttgtttgccctcaagcaaaacacaaaagccgaacccgtggaagaggttttgaaaacaaaggaacttcaacattctctagcctattgccatgatcatccaaactaaatccacatgcctaacaagtctaatcaaatcttaaccaacatgtatttctctccaagcttacagaactttctagattccatacctaagttccacaactatatccaccaggctttcatcgatgggtctcatcaaacaagctaacattcaagatccttctagactcattcctgaactataccatgataaatcgaccattctcgcatactggatcaacaccttcgacagttttccaacctttgtaattgatcattccaaataatgtataataatggggtcataggaaacattcctaccccgatacactatccgaaaatcatgtcaatctctcattttctttttatttttataaggggagaggaacacattctttctatcacattggtctcaatatcaagtatgaacaaggagtcaagatctatcaatactaaccgtttgaagaggtaaaaggaagagcagttagattagctccggccttagtggttgtgttggaaactaggatatcctcaagtctgttggtatgccatctagattttccaatagtcgaattgagtcgaacctgcagcactcatcaatcaggcaatagttcataactaaactaaacaaaacgttttttttttttaagagtaagaaaatgagtcaataaactcaaaaacaaaaatgataagaataaaaaataaaagcaatattggtaagaacctcccccacacttaaacgacactgtccccagtggcattcaaatccgaagaaggcggaaaaaataaatcaaaaataaaagaaaagaaaagaaaagaaaagaataatcaaaccagtgggttacctcccactaagtgcttgttttgagtcaatagcttgacttggcagagttcaggatgtgggtagattggtggaggattgttgttgcctccgccccctccatggcggtgtgtaaactgaaccggtctaggcagctgcatgtgtcgatcgacactcaatggtgtgtcgatcgacactcttctcgtcacctgcaagaacaacaagagaaacaagcattcgagaaactctaggcttgttaacatgtgaagcagacttcatagaatctaaggaattaattgaaggtaaagcaggagaagagatagaagagaacttatcacagagggcctcaagtggtgtgggctgaagaggatgtgcagaatcctctgtctgtgaatctcgagggtgtcgatcgacaggagggatggtgtcgatcgacactgatgctctgcaactctcattggcgagctgagctgatgggagtgttatgtgtggctctgttttgggattctgagcagtcagaggaggtgtgtctgtgctctaaacgtagttagtaagtgcctcccccaaacttaaacgacattgtccccagtgcattcaaatctgaagtaagcaaggaaatataagaaaaatgtaaataaaaagaaaagaaaacaaaactcatactagtgggttgtctcccactaagcgcttctttatagtcaatagcttgactttgtcgaagtgcagatgtcaagtggattagatagtggcagtgattccagcttgaaacgtagctattgtagataattctgcttaaacaagtgatgggggtcgatctacactagtggtggtgtcgatcgacaccaccactagcagtctgaaatctgttcctagacaataacagtcttccttatgtctccctgattttgtggagccttgcagtgctcctcctaaatctggtgcatatactgttgaggcattggacaaggaattttatgcgtgtagacttgttcaacaacaggtggaaagtcaaggctgattggtgcagtctgcgtccaatgtcgatctttatacttttttgaggcatccgttagttaactggacgcatactgcaccaatcagccttgactttccaaaagtaaaagggggacttgcatccgttaggtaagcaatgcaatcgaatttatacttttttgggactctacgaaccattctccgtgggtcccacccgctacgtagggaaactccatctagtcgtaacgaggcttgatacatgataaaaatgcgaaaacaacgtctaaacaaataatttaattcccgtaatatcgtatggatcacaaaaaagcccaaaaaattatataaaggtctaaatttggagtaaaaaaatttaaaaatatacttaccattgccttgcttctttcgtcggagggctctcattgtgatttccgaaaagctatcacgtaccaaattttccctcacggtttaaaagttatagagtcaaaacgttttaactaaaaaaaaaacaaaaagggatgaaaaaaacacgaagacttttcaggacccacccgctacgtacggatactccatctagtttaaatgaggcttgatacattaaaaaaatgcgaaaacaacgtccgaacaaataattttgtttcttaatatagcacggatcacgaaaagacccggaaaagtatctaaaggtcaaaatttggagtaaaaaaaagaagggtacttaccattgtcttgcttctttcgtcggagggctctcattgtgctttccgaaaagctatcacatgccaactttggcctcacggtttaaaagttatgagtcaaaaagttttaacataaaaaaaaagggatgcaacacgaggacttctcaggaggtcacccatcctagtattactctcgccaaagcacgtttaactgtggagttctgatgggatccgttgcattcgttttggtatgatcacatccgttagtacatgctatgcaatcgtatttatacttttttggccactctaggaaccattcgctgtgggtcccacccgctacgtagcgatactccatctagttttaacgaggcttggtacatgataaaaatgcgaaaaaacgtccgaacaaataattttgtttcgtaatataacacagatcacgaaaagacccgaaatagtacctaaaggtcaaaatttggagtcaaaaacaaacaatggtacttatcattgccttgcttctttcgtcggatggctctcattgtgatttccgaaaagttatgacatgccaagtttggccttatggtttaaaagttataaagtcaaaaagttttaactaaaaaaaaaacaaaagggatgcaacacgaaaacttctcatgaggtcaccctctaatactactctcgtccaagcacgcttaactgcagtgttctgatgggatccggtgcattagtgctggtatgatcgcatctgttagtacatgcaatgcaatcgtatttatacttttttggccactctaggaagcattctccatgggtctcacccgctatatacggatactccatctagtttaacgaggcttgatacgtaataaaaatgcgaaaacaacgtccgaacaaataattttgtttcataatgtatggatcacgaaaaagctcgaaaacgtacctaaaggtcaaaatttggagtcgaaaaaaaaatggtacttaccattgctttgcttcttcggagggctctcattgtgattttcgaaaaggtatcatataccaatttttacctcacggtttaaaagttataaagtcaaaaggttttaactaaaaaaaaacaaaagggatgcaacacgagaacttctcggaaggtcacccttctagtactactctcgaccaatcacgcttaactacagtgttctgataggatccggtgcatcttgatgaaatttagttatttttatcatcacaaaaatattagaaaaagtataataatgttacatttacaaaatttcatcattaattcgtattattaataaaaatggattttatagttaatttttagtacaaaatgataattaaatctttgtttggtatctttttttactatttaaatatttttttgttattttataccttattttgcattgagctttgaaattttaacaaatactaaaatactttaaaaacatttagtaaacaaatagagttagttagcatttaatagtttttaaacaaataaaataacctaatacaatatttctaataataaaacatatgttacatttaaaaaaaaacgcggttttgttaaacaaatgtttttgtttgctattgtaatatatacttaaaaaatattgaaaaatgataatgtataatatatgttgtgtaggcagaattttaaaagtttatttaaatattataatcattttccctgtatattccataaatatcagatttttcatcatttaattaatttcttagttttggaaaaatttagattaatatcttaatgaattatttctattttcaattcaagattaaaacaaaatcaacggtcaagatttttgtctttttagaatatcaataaactgttgagattataaagtgaaaccgggtcaaaattcgcatcaaaaagatgtgtgtgttttgaaactgttttttccatgaaataagtttttttaacccacttgtatttttgtgattacttcaaactttttgcccatctcactaaacaaactgcacaaataatagtatatatatatatatatatatatatatatatgctttatacaaatctctgcttttctaatccaaatcaattcaagatgcataaatcgtttgatcaaatttaaatgataagacgctatatatgataatgaaaaaatgataaaaccaaactgtttatcatcgtatcaaaaaccaatgaatgagacattcaaaactttaataaccaaacctacctacatgtataaggctcaccttttgatcctcatcgggtttctgcaaattgacaaaacaaagactaaaatccaaaatcaaaaattttaaaaagaattactcatattctacaaatatagagaggtggaaaatcttaacatattactttgcataaaagattctactatattatttgggaagtacattttaaatgtaacctcaatttttgtaattaattacatgaaatgccattagaaaaaattaatcaaaaacaaaatcttttaatgacgtcattaaggttaccaaaatcatttaacgacaatattcatttcttaattatatggcttatcagatctaaagacgggtcatcaaagatttcctaaactgaagcaaaatataccgaatattcaaatatctatctgttaccaaattagaaacaaataagttaataagtcaataactatttggagggacgggtttttgaatcaacattaataaaaaagtaaaatataattaatccaccgtttcaatacgggtaaaatctttaatttattattttgtaagaccactaatattaaacatatcaaatcaatctaatttataaaaggttatataaaacaaaaaatgttatgtggtatgtataatgttactatatataaaattaaactataaaatataaatgtattagggaatgatacaatttgcaaaacttttatatataataaataattcttaaaatttttaaaaatactactttaaaaacaaatcacaagacgggtaaagaaattacagaacgggttttattttggaattgagttatatggtggatgtatttgaatcaatatttataaaattttaagatattattaatatgctgttttaataagggttaaaacttcagtttttaacaattgtctcaataaagaaattacataacaggttttattttggaattgggttatatggtggatgtatttgaatcaatatttataaaattttaaaatattattaatatactgttttaataagggttaaaacttcagttttttaacaattgtctcatggattcgtggtatagcgttacttaataacaattataaactgtaaaatagaaatattttataaaaataaaatttgtaagttttaatatatattacctttaaaaaataaatcgtttcgcgtgggggcagcctaagcctgatagaggcagaagaattccaacaatttctcccgctcctcaaaagtgagttgctcctcacgtacgcatgttctaatagtcgagttgctgttgctaaagcacctatggttccatccctggtaacttcaaccggtatactgcgggttaaaatctagtaaataattagaaaggaagacatactttaacaaaatcatttgtgaatctacatcatcatcttccacactacctgcatgaatattaacaaaaaagtatgtcagagaatatatgaaattaaaatttttataaaatataaacaatataaaaataaattacagatttaaaacgaaattaaggtttgtagtagaatgcgctatttcacctagtggaatgcatggtcttatatagtactgaagaaggaaggctcatttcagggttttgaaaaggaatattctgtttagtttgtagaaaaaaattttgatttaaattattataaatttttgaaacttgatgaattatagaaataattaatgagtttcttaaacataaagatttaaaatccctaaattgatgtgaagtaatttttcaaatgtgttgtaattatttttcaaaatatgcttaggatttttcaaatttaaacaatacataatattaggaatgttaactaatagaatcaataagttcaagatttgttaatgatttttttgatgggctgaggggagacaattgtcaaccccattttattaaaagaactacaaagaattacatcaaaactgctctagggaacgatgtcccgttagcatcctcaaccaaaaataaaagaacgtcctcaggacatatctcaaaacaatgaaatcctaggggtaagaagaaagcatagtttgctaacccgtcagctagacggttagcttccctatacacgtgtgacactcggactagccagtcccttgtgaaaaagccttggcacaaccgtaccaggaaggacagcggatgagccttgctgatccctgtgcttagaaaccccaccaccaattctgaatccaaatttaactccacccgtcgaaagcccttatcccaagcaatgagcaacccatagtaggcaccccataactcagctaacggcgcatcacaagacccgatattaagtgcaaacccaccgagccattccccctgcagattaaggattgccccacttgccgcagctaatccctggtgtcccctcgacgctccatctgtcgtcagtttgacccacctgtcgcttggtgccttccatcttatcatcctttctacccgagctctcttcacatggttatttaacgttcccacatgagctttccgaacctcctctgctatatccttgatgaacttcaatctatcccgacataacttgcgttccccaaatacatcgccacatcgccacttccaagcccaccatatccccatactaaagagcgtaggccaatctcccttcgccggatccagatttgtaaacaaccattcaaattgactgaaaaactcgttctgccttctttgtggcagcagcctttgccaaataggtgtcatcgccggacagtccctcaacacatgtaagatcgattcatcagctccattacaaaccgaacaagttgcaatgtcacttaagtgtctcctcacacgctccacattagtcataataaccatatgactcaccaaccagatgaaaactcgtaccctctccggcgctaccagcttccaaatttgctttaaaaaactccctatgagtggcctctcctcagcctcaggtttcagcagctcataagcggaccgaaccgtgaagtccccattttgcgttcccttccaagataactcatcacttgtccctgggaaatcatgcaccacaatagaaaataattttcgcaagatattctccagcaggtacagagttagagctcccatgtcccaccccgagcctgcaatctagtaatctgctgctaccttaggagcgcatccgccgatattgattctttggccaccgccgagagttgttcctgcaacagccaacgatccgaccaaaaacttatagttttcccatctccagggacccatctgactcccttagccaccacttctctaagtccaactgtaacacttcgccacgtggagctccagctacttttaggtttcagccagtttgaattttgcatttctcccaccttgtacttcttgctaaggactcttgcccaaagtgtctccttatcatggagaagacgccaccctactttagcaaccaacgcctacttcatctttgggttgacatatcttattccaggctaagaggtgcttcttcttcttctccaaagtactcccccaaagaaaattatgtgacaaacaatccaagctatctaaagtagcaacaggaagtattattgcactcattacatggaccggtatggttgacaaaaccgcttttgtaagcgttattctccatgccagactcaaagaccgactcttccatcccgccaagctagacgaaacgtgttccaagacttccccagaagtctctttgttcattctcttctgtaagataggcattcccaaatacttccccaactctctagtacagccaatcccactctctccacttatcaacctttccatatccctactcacattattggagaaaacgatctttgacttctccaggctgacgttttgccctgaagcctcacaaaactgttccaacactcgtcgtatgataagaatttgggctacagacgcttctgcacatagaatcaaagtcgtatgcaaaacaaatgtgtgatagtttctacccaccacacgagagtgccatcggtttccagtcccatgttcccactgatgcctctatcaagtgacaaagcctctcaaggcaaagaacgaacaaatatggtgacaaaggatccccttgtctcaaacccctagcaggaacaaaagaatcagttttccctccattccataacacactcatcgatgggtctgttaccccagccattattctgtgagtccagacctccgacagtccagtagccaccaaagtttcctgcagaaaattccatcgaattcggtcataggccttttcaagatccaattttaacaacatccaccctttccttcctttcttcctccgcatagagtgaaccgcttcttgcactaacacaatattatcaatgcttaatcgccctgggataaaattcgcttgagccggcccaatcagcttcaaaataaccttctttagccggttaactatcatcttagtaataatcttaaacaagacattacatagactcattggtctaaactgtgtaatccgctctggcttagccactttggctatcaacacaagcaaagcatcattagtagccgctgatagcaccccagtttcaaagaaatccagtacaaagcgtatcaccgacggtcccacagtctcctaacattgctgataaaaaacaggctgaaaaccatacgggcctgatgccttaaaacgtcccataccttttactgcaacgacgacttcctcagaagtaaaaggtttgagcaacgcagccttttccccgtccgttagtgttgcaaacccgcctattggcaacatgttccatactgcgctaacatcctccaaagagtatagcctcgtatagtagttcaacgccattgtttccaactccaccttatccgtcatccatctgttatcgccatctttcggcgattctattcgattcctttttctgcggataattgtggaagtgttgtatttttgtctcccaactcaatatacttttctcttgacttctgaaaccacagcgtctcctcttgttccagaaccaagtccaagtctttcaataatatctcttcttgagcaagcaactcatcggagtgcatcacatccaacaaatcctgtactgccttaatgtcagccaccaacttctcttttttgacatgaatgtctccaaagacctccctgttccatttctttaactttcgttgcagcccaagtaacgcctctgtcgtcgacaaagctgtatcccaagacgctgtcaacaactctttgaatcccccatgactcaaccaggttgcctcaaatctgaatgctcgtcatcgtggatctaacttctgatacggctccaactgaacatatagtggagcatgatccgaggacatgaaaggtaagtgagagaccacagcctcttgccacttttgcctagcatgggcacagcccaaaactctatctagccgtttagccaccatcgtgctctcttgtctacccctcctccatgtaaacttattacctctgaatccgaaatcaatcaaagacaactaattgatccagtctccaaaagctaaaaaatctggtgaaagcctcccatttccacccattctctcatccactctcaagatggtgataaagtctcctccaattatcaacagccctaccaaaccagatacaacttccttcaactctccccataaaccactccgccgactcatagatggcgccgcataaaccactattagattcatcggatccccattacagaccaccttagcgtggatatattagcttgttgacaccacaatatccacttcccccacactcgacttccatagcacccacaagcccccactctgacctgttgcatccaccctatatgcattctcaaaccccagcttctgacaaattctacctgctttttcacccccccccccccccccgcgtgagtctcaaaaagcgctagtacctccgtatcaaatttctttagcatataccgtatcgatcttctaaagatggatttattcgccccccaacaattccaaagcatacaattcatgatgacttcacataaactcataagaactaccggggagtaccattacttccctccgctactgatactatggctgcatgccccttctttcgggccaagatccatcgacgcacttccactagctggtgatctgacctcctctccatctctctgattcccaactggcagctgtgcatttcctaaattcctgctactcccattagaaaacgcacctccaggtctgcctacattctcatgctccacccgcagcctcttcctaggtgacacttctgtttgctctcctctgatcgttccaaacaccaaacctctggtagcgatcgtattccttccccctttacctttccgtccccctcctttcattggtttatagtgaccagctctcctatctgttattaccccaagccttccttttccttccactaacttcccatcaggcccacctaacctcacaacgctggttaacgcagccccatccccctcattctctttattttcttcccctgagctatctggcaccagcatcccttgttcctcttctctctttccacactctttcctgatctcttctccgccgatccccctgctggaaacgtcattccctttccttggactggcccccgcctggacagtatacgtacctccgtaaacccatcactgggttggtccccaccacttggactagcaccactctcagtactggtgacctgcaccaccggacccggactcctcttaggacaagctccagccaaatgcccaaaaactccacacaaagagcagataacattcaaaccctcataagaagcatagtagcattccccattcaccaccactgtgcctttcaaaggttgcttcaggttgaccttaacacagacccgcgcaaaatgtgctctctccttcctcagaatagttaaattcaccttaatcggtttccctaagccctctactatcgcggtcaaaattgtctcatggtagtaattgacaggcaggtttgagatgcgaacccacaccaaagtggtcacgatctcgtcacggattggattgaagtccggcgaccacgcccgaatcattaatatactgcctagtaccctccacggatccccaatagccgctgctaaataatcctcctccaaatcaaatttcaccatgaagaagcttctagggagattcaacactgacatccccccatttggcttccatagctctctcaatcgccgatttaggtctgcaatcgtgatgtggcgtcctaagactttgacaaccagacactgtaggtacaaatcgttcatcgcgtcgaggacttcctgtccaatcgtgatgatcgcttcaccttctgccccagtcagaaactcgacattcatcctcgaagccacaaactctgcactcaatctcgtctcaggaattggaattcctccacagtagcaactttgaaccttatcgacccactacggcgaccccgttaaaccccctcccggcggccggccgttctcctccatgtgctcatcgagatctcctggattcacgaccctagcggcgctagggttttctatcgacatcgccttttcaatcttttcgattgaattatggaaacagctttctaaaaaagattttaagatttgttaatgattgagttataactacagagctaattcggtagagtcttaaagaaaatactgttattttctttctttatttaatcaatttttacaccaactttcctaattaaaaccatttgtttctttttaaaatcaatttctttgaatgattgtttaacgatttgatttaaaaccaaagtttatgataattaattattttatgattgtaatatttaaaaatatttcctaaatatctcaaagaaatcataaatgctaaatcagttttgataatatttatctattttaattatacaaaaatatttaagaaatataataatattatattattactgtaatcatcgtttgttatctctttattactatttaaatattagttgttattttataatttatttactatttagttttgaaactttgacaaatactaaaaaactaaatgaaaacttcgtgaacaaattgaattagttagcatttaaggttttttgaaaaaacaataagaataatccggtacaatatttctaattaaaaacatatgttacatttaaaaaacaacatatctggtttttgttaagtaaagtttttgtttgatattttaatatctacataaaaaatatttattgaaaggtgataatgtgattggataagtaatattttaaaatataataagtattataaatccctatagtataggagtataattagttttctaatttgaaacccacgtaattatgaatggtattgaataagaaaataaattaattaaaaaaaaaagaaagctttttcttcccaaaatctggctgtataatttgatttttactgaaaaagtcaatggctactatgaaatgtaatggatgactaagattagaagttatgacccattattttaaaatccgggtcaaaaggatccgcgcgttttgaaacgagtttttttcattacagaaattttttaactcaatggcaaacttgttatttcttcttgatagtcttgttatttgtaactccaaattaagataatcaaattaaattcatcgattgaataataaattatgtactttattttgagaggagttaaaaaattaatatataaataatgtggacttttatgttcccatccattatccatttatatatgttttcttttgtgtgttttacacttatcacaaaaaagggtgtattgaacttagtattttgtaagattttgtggattttagatttggagagattttaaaagacggctagtgatttggtggatttttagaagaaataaaacaaaatttaagtggtcattgaaaaaaaagttagtgatcatttagtgatatttgatgtcaaattccataagattttgaagtattttgtgtgatagtccaaaattttttttgctaactatttaaaaactcataaacgtttctacgtgtgaatgaaaaattcaaaatttggagttgcacattggcgaattccattaattacaaaaaagtatcagaattataaagtttcattcactaatccattttttatttaacattccatttgctagtccatccatttcgaaattttgcaataatacgggggtatattcgtcattgtatgttagtattttttagagaattgataagtttataatttgcatgttttacacatccttttatcaccattttgagtctagtttcatccatctttcatagcattcaccatcatttttgtacattttgcatctttagtcgagtctaggactagtcttgcatacattctgcattttggagttgtttcaggtgttttggagctattggtgctcagaaagagggaaaacagaacagaaagtcacacttccaccaaacatactcgatcaccagtagcagagagggaagcagtcagctcagcagtccatctagacacttctactcgatcatagacgagaccaggcagtccattctgccagatatactcgaccgcagaggagaggaggcagtccattctgcaattctactctatcgcagaggcgaccaggcagtccactttgccagtccaccagttatactcgatcgcagaggagaagaaccagtccatcctgacagctgacacacttactcgatcacagagggcaagaagcagcccggaccattctgtcaaccaacctactcgaccaccagctcgaccctttgatcaatccgcactcaaccagacaacctgagcatcggaaagagaagagaagagaaggcccattcgaagcccattcgaagcccatcaggaagcccactttgagccgacactcttgatcacactgtccatgggccgtaagtgggctcgaagcccgctatcttatcttagtataaataagtctctaagggtttcgccctgagacatgcactttagagacacgaatttcgcaccattattcagcagccgcttttcattcctacaactttgtatttcgatttttcttctaagttattcagaatttgctttcattttgcttgttcatctttcgtttatatgttattgtctttaagcatgttgtctgagtagtgattaggatttctgaggatgggatagagtagttgtggaacccctggtcgaatctgttggttaagtgtagattttttgaatcccttgtggattagttgtgtttactgcttattcctttctgatcaactggaatccgatcccagacgttccagcgcccagaaggcgtttaatggaacgttggatctactagttccagtgataatcgtctctatcccaagggattggccgtttagagcggttattggctttaacagtcggttcttattgtctgcttagttagagatcgctaatgggaattaggcctgtgtctagctatgcttgaggatttctatcacgggagtaaattaatctgttgttgaacctgttgtctagggatagcttgattgagatttgttaaccaacggaattgatcagggagaccacactatccgattatcccatccttagggatttctctgtttacttacctgcttcattcacttgctattggattttagtattttttctattttcaaccattctactcgatcacaccagtctactaacagtgagactgcgtgatagagtaaactggtccatttctgcatattcactctctgtcatcgtgttgtactcgatcacagggtcccttctggcagtcgaccctgcgatcgagtatatcagtcatttctgtcattttttactgttttctgcatcaacactaggactgttagaaaaccaaccaaattctgcctggcttgacttagcaacttctgatcatatctcatctgtctgcatcacacccatttggattgacatctaaaatactacaacgacaggatagtgttttaggattaattgactaaaaaacctactatcaaaaatatatacaaactaaccatgataatgaaaagaatcaataaattaactatgatatacaatgttttgtcagagggtagatgaaacgaccattaaacctttcctttcaatttatatgttttatcgtcatcaacaacatcttatttctcaccgtcatcaacacaacatccaccaccatcctcaacatcaccaccaacagtcaagatttaattgcccaccaccctcactccaaccaaatcaatattccttctattgtcattaacataacctccaccaccagggacggcccaaaccatttttcatgcctaaagcaaacaatactttaagcctactaataaacaaaacttaaatgaaaaaatccaaaaaaaaaagaaaaaaggaactcgaaccagtcatctcatggacgttttagtacagttacacgactatgccacaagttaaatttgaaatgatgacctcaaaacttttacaatatatttgttatgcctaaagcaccagattcatgagctttagccttggaccgggcctatccaccatcatcctcgacaccaccgccaccatgctcttgaccactgccaccaccatcctcgacaccaccgccacaatgctttaataactaatatagagatatttatcaatatttcatgctattcaataaaatcgaataaattcttgcaattatgttctatatatttcatgctattcaacaatatcacatgaaatcttgtaattatgttctatataatttcatgagattcaacaaaattacgtgaattttcacaataatgtccaaatttctcaatataccatgctattcaataaaattgagtgaaatctttcacaacaatgttcatatttggcaatatatcatattattcaccataatcatattcatttttgcaataatgcctcctcaaccctcgtacattttctctgctacctattgttctctaattctgaaaaaatatagaaatgattatttggtaaatgtccctcttctaaaaaatcagtctatggttaatttctgatagaaaacaagtcaaacattattttcttaactattttacagttaaaaggttattcagtaatattaccctattttttattttcttaggtcatcttctcagtccttaagtaaattactcattttcgcatcaaatcgattttgtttgttctctgctttttggtttagggttttagcttttcaaagttaaaaccttttttccccccgaagaagaatcaatacgaccgatcaaatcaatccattgaatctatggcgatggctatgagacttccagcgatatctagagctgtgacggaagtagcttcgtctccggttggtttgagacgactgttctgttcaaatgcttcaaggttctcttttctgtctccaccggctcgtcgtcaggctgaacctagcaccaatctcttccactccggtaacaaacccttttcatctctcagttaatttctggttctttcgagggtttatcgttgttcgagtatatgtttgatgctttttaaagatccttcctttatgaattcagatttagattatcaggttcgtctaagatgaactatatgtgtttaagaatttgataagttcaattattcatttttggttctgatttccagaaaaatgtctgctttcgattgcttaactctagaaatgtattgtaagagttaaagagagtttctttgcactcaattacttcagaattcggtttgttcggttaaaatttggatgcttacgtgatgatatgtgtaccggatcaatgtcttgtttcaagggtctatgtgggctgtttctagcatcttcaaggcttctgtttttgtaaactacttcctagtatcaattagtttttgaaatactgcttaacattgggctttgatgcaagcaattttgattaggctcttacttttgttccttcatagcctctgtttctcacttttatcacatggccattatcacatacatacatctaaggaatgttatgtgttcgatactgtgtctcagtttcgtgaaagtgtctttttgtcatgttatctttatctttgtgtcactggatatttcagggcttagtaagcgcatcacttctgaaaggtccttatggaaccgaatattctctcggaacatgggtggtggtccgagaactttccctggaggactaaacaagtggcaatggaaacgtatgcacgagaagaaagcaagagagaaagagaacaagctcttggatcaagagaaacagctttacgaagctcgaattcggaccgagatccgagctaaaatgtggggtcatccagattccggtgagaaaacggcgaaattgaagcagagtcatggaccaatgagcccgaaagaacatatcaaaaccttggctgatcggtttatgaaagctggtgcagatgatttgtggaacgataacgatggtccggtgaagaaatttgatcaagggtcgagatcatgttcggattcaattgattctacacctattgatgtgaggagattagtttctgcgacatgtgattcaatgggtaaacatcgtgttttggatagtagtaggagaggtttttcgagtatgagtagatttaagagaaatgagagttcttgtgatgaaggagatgacgttgatgctaaaaagttagatactttgagtcctttttctcctaaattttctggtaccaaggagaaagtgaagagctcgacgagtgttgttggagttataaggaacaaaggtttgtttggaagaaggaagtttaggaagaacgatagttcaactgaagaggattcagatgaagaaggcaatgagggaaagatgataggttggatggatttgaggaaaacaggaagcagtgcgtcgttaggaaaccacgatatcaagctgacgaaaagagtgaatcgtaatgtcacagacgaagagctttatcctcctttggatattaatagagttagagaagatctcagtaaaaaacaatctgtggataatgtaatggaggagaagcaagagcctcatgactcgatttacagtgcaaaaaggtattttaaactcgctgtgtaaaggattttgatttgtcaagtttgaatcttgatgagctctgttaatggttgcagatttgatgagtcttgtatatctcctttgacgcttaaggcgctttctgcgtctggcattgttaagatgactagagtgcaggatgccactctctctgagtgcctagacggtctgtgttcttctagttcttttggctcaaatggtttgcatttgacaacgtattatcctatatgtaacgcaggtaaagatgcattagtcaaagccaaaaccgggacgggaaagagcatggcgtttttggtattttacaatcctttctcctgagattatgccttagcttttgttgtttcttaagataacgttgtaagactgaaaaaacagcttcctgcaattgaaacagttctgaaagctatgaacagcggtaagggcgttcacaaagttgctccgatttttgttcttatcctctgtcctacaagagaacttgcaagccagatcgctgcagagggcaaggctctgctcaaaaaccatgacgggatcggtgttcagactctaattggtggtacgcgcttcagacttgatcaacaacgcctagaatctgagccatgccaggtttgaccaaccgtgattccctgtttaacaggaattgtttatattttctagttgttgtggtgaatcttcttttgtttccgtaccttgttgcagatactaatagcaactccgggaagactcttggatcatatagagaataagtctggcttaacatcgcgtttgatggcccttaaattgtttatagttgacgaggctgatctattgctagacttaggattcaagagagatgttgaaaagatcatagattgtttgcctcgtcagagacaatctcttctcttttccgcaaccattccaaaagaggtacaattgctatatagctaacttcatatattcttacctttatcacaaaatccaatgcggacacaaacgtctaaaatgtagtttaaattcaggtccgtcgagtctcacaacttgttttaaaaagggatcactcttatatcgacacaatcgggctcggttgtgtagaaactcatgataaggtaaactcttaagctcttctttttgtctcaaaagcttgttacttgaatctggttattgagtttcttgctttggttttaggtgaagcaatcttgtattgttgctccacacgaatctcatttccacttagtacctcatcttctaaaagagcacatcaacaacatgcctgattataaggtaaaacaaatcctcttaaacgattgcttttttatttctgaccttggtaattctcgtaactatccaatttcattctcgcagataatagtcttttgctcaaccggtatggtaacatcactgatgtacactctgctccgggaaatgaaattgaacgttagggagattcatgctagaaaacctcagctccatagaacatgtgtatcagacgagtttaaggaatcaaatagacttattcttgtcacatctgatgtatctgctcgtggaatgaactatccagatgttactttggttattcaggtaaagcacaaagcgaacattttcatgccaaaaacaaccttttatggatatttaacggattagactttgttttacgtttttggtaggtcggtataccgagtgacagagaacagtatatacatcggttaggtagaactggaagagaaggaaaaggaggaaaaggattgcttttgattgcgccatgggagagatattttcttgatgagcttaaagatttacctcttgaaccaattccagctccagatcttgattcaagagttaaacatcaggtttgttcgccttcactgtcaatacccataagtggagttttattgccaagtgacattgaggacaattgatttttgactaggttgatcagtcaatggctaagattgatacaagtatcaaagaagcagcgtaccatgcatggctcggttattacaactcggttcgagaaaccggtagagacaaaaccacgttggccgagttagctaatcggttttgccattctatcggtttagagaaacctcctgctttgtttcgaagaaccgcggttaagatgggtcttaaaggtatttctggtattccaatccgaaaataaaccgacccgtgttggtacttagatgtatcgtcgtagagagaaatgtatgaacacatttatggtcaacatcatgtttaaataattttgttatttatttatgaatatatgattaactttttaattacaggaatttttgtttgtctaagtcatgtgtttatatatttgactactagtgtaatggcctaaatggagattaattaattttaatatgtacattacagatccttaagcaaagtaaaaacatacattattattttactaaaaaatgtcccacgcgatgcgtgggtgaaatgaatgtagtgaaatatatgtctataactaatatatattaatataatattaaattattttataatacattcaataaaaaatatcataaatattgtgattatgatattttagttttaaactaaacatttagtttatgaattataatctaaaattattttgggtatttataaattaaaaattatcgaattgataaaaaagaaaaattataatattgatatacaagataaggcttgtgttttatttaaatatatgaaaatgatatgcaatatttctctgagtaaaagatttcataattgtatatatcatattgattatagtatgtgtgtaaattgtaaagtagttaatagatttgaagttgtgagattgataaagtcttgattaatgagtaagattaacatatatgaatattgatatattaatactaattgatatcaaaagaactctaaatactttatacaattaatattcaaattatttactatttcttccatctttgaacaatatggtaagaaagtattgaatttatttactaatgatttagtatatacacatgatttttaataaagaagtttaaagttatttcgatgcacataatcaaatactaaagaaaatataccataattcggttgaaaactaaataaatttaaaatttaaagtacaatgtaacaagtaacaacatacaaaataatttaaattaacagaatttccaaccaatgatatcaatgaagattatatattttgtatagtttcatcattcatcaaatctcgtaggttctatattatctttatccatataatttctttctatattacctcatttgccaacaaatgcatcaaaagacgaattattatggtcactataaaacttaagaaacgaaatatagtgtaaatttagcatgataagtaaaagataaacattttttcaattactatgattagtaaaatgagttataagttactgtttagtacataagatcaataataaatcaaatgtgtacaaataggaataatgtttgtatattaaactataaactaaatgaaaaagacgaaaattaaagaagtagccacacattaaaataaaaagtgaatatattaagcaggaccaaccaggaaatatcatatggatccaataaacatttggctatatatgtttatcatttggttgagtattcactgttgttattttttattgaaaaactaaaataattttaaagattaatatgaattttagcaacttgacataaatattttataaacaacattggtcaacttcaaaacatgaagaataagtagaaaatgaaggtaaaagatactttgtttctcatgtaaaagtgagaaggtaccttagacatttttcatcaagtcatttctaaaggaaatccacctttcacatattcacttatgcatatactataaaatttgactcaacctctttatttcaaaacctacgaaagtcacataaaattttgttttaaaagatatttagttaaatatatatatatgtatatctattaatactatgtttatatcctctattaaaatatcggacatgttcataaaatagcaggttgaagacaccgggttcccatgtcgaaccactaaagtgaagctaaaggcctttgacaccatttactaaactttgaaactttgactatggttgtgactcgaatagttaaaacacaaatagctggagaaaaaattagaaccatgacattaataattaaataaaatatacatcacagatgagcatcgagcaacacatatatgatttgcctacctattaccttcatcatgaacagaaattctcagtgttatgattgctaagaaattcttagtgtaataatttttaagccactttgtatctaccattgcacctataaaaggatgtattagcaaaaacacatgaaacatgttataaagaagagaagtaacaaagtgtgaatcagtatcaccacatttggacgatacaaaggctacacaaaacaaatattaaaattataaaaatgagagagagaaacttgattttagttcatttctttggtgaaaatgagaaaaataaaaaacaacgtaatacagaggacgaagcaaacctttgagattaccattctttggtttctccaatccgtcatactcatatggttcgtgctttgtcttttttctctttactttcaatttaattatgtggaaagacttagcagaccacaaaatattatttcgatgtttaaacaatcccgaaagcaacacagaatgatagaagcttaaaaggagttgtaagaaacaaaccttgaggaaccgatgttgatgttgttcctatgaagaatcctaccaggagcagcgtcaccaccatcgatcaactctctaagcccccaattctccacctcctcttctttcacctccttcttcttctccttctccacatggcggttattaggaagcttcacaggcaacctctcgaagtaattcccgatacttacgatgcacgtttttattatcttcgtatagaaagaatgaagcttcaacctcaagcgttaacaaatgcagagaaaccaacttaaaaaaactgacatgcagcgtcttgcattttataaggtgaagggttacactaaaaatgatattaaatatgatactaaatattgaaatcatggtcataattacataaatgataattatgttagtgtaacgtaactgctttgatttatgaaatagaacagtttagttgactaaaaaaaaactgcaatagttagacataataaataaaagaaaacgtgatatcacatgtgtcattaaatagaatattaacctcacaacataactgaaacgtattatgagtaattcattgttttttcattcaatttattatattgtaaatgatatttatgacttaagttatatggtcagttatgttgtttattttgtttcaagatatacaaataaacatttaatcgattatgtgagaggccaaatttttttaaaacaaataaacaaatgatcatattgtcaacaaacacataccataatctactcatacattttttatattttgaaggtattttagagaaaaaatatttgatctttggtttgaaagataaaactaatattttattctttaattcttgagaaattattttgttgagaaattctaatgttatggtaattatataaaaatattgataaatgatacatttttaggaaaaataattatttagaaaaagtgcattgcaaaaatgttataagttttttttattataaaactgtaattaaactcaaagaatatggaaaatagtatatttaaatttgagaagaatgacacatgtcgaatgaatagagcgccacttgtcagatttttagagtacaagtttgaggaaaccttactttattatataagatgtggttggttacttgttcgtcttcttaatttttcgacaattattaaataaaattgtgatgattgaaaactatataataaagacaaagtttgggaaaataaaaataaaataaagaaacgtgcgagagagtataggtggtagattctttttcagcttgttcacttgagtataatttttttttttttttttttaaacattatattaataaccgatacaaatgttatgaccaaaagtcacacagttttttgaagttcgatacacaatatagccataaactaaaagtatatagagataataaccaaatcatccgcttcggttaccttttgagatcagcataatagaaccattagccacgtccacggttcccgcgtccacgatttccgcgtccacggttcccacgcccacggttacctcttcctcgagtagtagaggacgcttgtatctccttagctttgatggatggtttaaccggtctttcgcgcaaaagacgttgtcccgatggagtcataagttccatcaattctgacccactgtctgactcaactgaaacaattgagtcttcatctgaatgaagagaatccccatcaggaaacgaagaacccaaacgactaaacctgttttcagcaaggacgtgtcttatctcacaatcactaagaatcacttatcttttgtgcctgcaatttcgaaaactgattcaactgtgcaagtttcctcagttacaacttcagcttcaacatttgtaaagcaatctgccactccggtgcaattatctttgtcttggattgggccagcctcaatatcgaagactgtatcgatttggatttttgaatttgtgattgggacatcaattggggtcttggtttgaagagtgattggcgataccaaatttgtggcactagctaaacttacaatagcaggagtaatgatctcctctgagacaatttctgttactttttcatgtgccaaatggggtttcatacagcgcgaagccttatgccctaactgcccacattttccacatttagctgggatccaagcatattcaacattaaccatcgatatattgcctttcttatcaactgcggcaattcttggagggaaagctttactcaactccacttccaccaagatattggcctcactcattagggaagggtcaagtctaggtttgtaagtagccataggagcacctaaacctgatgcaatatggctaattcctagaattgagtacaaccggtttgggatatttttaagggttacccagacaggaatagttgatatttcaggaagatcaaatgtatttacagtagaccaaggcgctacaaacataagacaatcatcaacatgccataagcccctctgaagaacccaagctctagttgaagcatccgggatgtgaaaaagaaattttgagtcacctaatttacggataaagattctacactttctaccctaaattttattgactaccgcatgaatcaaaccaccaggaggaggactacatctatagaactggcctaagacatattccttttgattcacaagaccttgcaagaagacatgacttggaatcgttacctttggaattccgtcttccatgaattccggcgaggttgccctgtaaaggttccttgccgctggatccatttttgcagcccaagggaagcgaacattatcctccttagttgcttcaagatgagattgcatcggtgctccaccaacatcttgctgagaggccgatgacgaggtgaactttagctgctttgcccaagctccttttagagtaggggagaccaacttaacaggagcaatggactcgtcgagagtagcagacactattggcggtaaggcggaagtaggaagagacacttctgcggaataagacaatgatgtaatactcaccacatgttcaattggaggctcgacagtgaccggtaaggtcgaatccagcgaagaagtaagattcacgaagtcaagagaagaagagcgagcaattttcggcgaggatccaattgtcaagggtttcaccagtgagatagaaggagaaatcactgatggagatggagaaggagaattctgcgtccaccgagtcaagtacggccaccgtggatcagggacagagttgacattggaagagtctacgactacaacttttggtccgacctctgtttccttgccttgagttaaaactgagacagaattcatcgagtgggatactgtgaagtgattgattggaagtaggctctcctaagaagattaagagaacagccggcgacgtttcgcggtggttacagcgaaacaaattctcaggggctcctcttggctgaagagtaatctcatacactcttcttataaagagcattttctttttgattttttttattccgtaaaaaaagtactcagaaaactctaagaatattgattaattacgacccaaccagggcaaatggatcccaaaataacccaagcccactgttttcgggtcaaatccaaataaaaccctaattcccctaattctctgcggtaaaattgattcacatctctttcttccctttgttttttgtttcttccttatttcgtcactgtaaaatccagtaaaaccattctcaattctcgtcaacgacaacaacataactgttcgtcgatcttggtatatctacaggaaactaagaaattgggtaagtgatttaattgttcgtcgatccgagttgtttcagattgggttttgtgatcgaaattgactgaagagtagtgctaatccaaatgattttgtttgtaggtttggagaaatggctcgaacaaagaacgcaggtgtgccattggcggcagaggtggtggtttcacagacaatcaatgacgaagtagtagtagcatcggctgctgaagtggattctgaagcaacaaattcaatctctaacgacgatagagcgatatgaactttaaactttacacaattagaaaagtataactatgtatgaatttggtatatctttattgatattgtaacttagaaattttaaaaagtatatctatgtataaattagtatatctatgcataaattgagtatatcttttttgaatctaacttagaaattttcgaaactaaaaactaggtatatctatgttcgaatataacttagatattttagagactaaacaatatatctatgtataaattaggtatatctatgtggagaagttcttccttagggctgtggctgatctagagttgtgcaaaacatttccgtggggaagatttgcatttgaagaaaatgtgaaagacattttctatttgattaaaaagtgcaatgaagtagttggtccacaaaaggtgtttcctagttttgttatgcctttggaggtatgtcatttcattatgcatttatgaattgttttaagaaagttaaactatgtacaactgtgtttttattagcagttatacttattagtttttgaaaaatcttgtattgtttttttgtagtatctagcatttgaggcgatcccagttctcagaaaaattttttgcgaagatattgaatccgcagatcctcagtgttcccggatgtgtaaaaggaagtttaaatcaagcactatgaaagggtttccaatgtcagatgtgtatgacaaactcggtacaactaaggttagtgatgacatatttattagttatctatcatgtatcatgtatgttctatcatgtatgttatattaattggactttcttatcatgcacaggacattcagagtatcttggcttcaactcctgatgagaagctacttttggaaagaattatggataaggagtgtgaagtgaatgatgtcgatgatctaatagctgatggctggaagaaacgtctagttgatgaggagaggactatatgttttgaaccgttgctcaatgaagatgtagcacaccggagctttgtggctaataaagctttgtctactgtggtaaaagctccaagaaaagccgcagtggaaaagaaaggcaagggaaaggctgctgcagctctgactagtccaagtgatggaggtttgactgaggttgtaaacgaaatgaagaatttgatggagaatggatttaagtccatgaacaagaggatgaaagatttctgtaagaagtatgaagagcaagataaaagactgaaactgatggaagctgcaatcaaatcaattcaatcaggcattggaactgaagacgcttgtggttcaaaggagattgatgataaagaaaacgagctggaggaagggagtgatgcagagactgagatagacaaagaggtggctcaaggtgataaggagagagaggttggagaaacagagactcagatagacaaagaggtggctcaaggtgacagtgataaggaggtggctgaaagtgagaaggacaaagtggtggctgaaagtgagaaggagaaagaggtggctgaaagtgagattggggtggctgaaagtgagaaggacaaagaggtgcctcaagatgatgagatggatggaggtaaggtggctgagagtgatggagagatggatggagagaaggacaaagaggtgcctcaagatgatgagatggatggagagaaggagaaagaggtggctgagccaagtgagattggggtgcctgaaagtgagaaggacatagaggtggctgatagtgagaaggagaaagaggtgcctcaagatgctaaggtggctgagccaagtaagaagcgaggaaaggcacatgaggatggagatgatcctagtaaagagggagttaaaaagccaaaggtggtcaagaagctggcagagtcgaggacggatgctaagccggtgtatcggagtcctatacagacgaggtataggagaaaaaagacaaagaagaatgtttaaacaatttcaactcttggtttgttttaggtataactatgttggttgttgaaaacttggtacatctgttcgaacttggtacttggtttttttttgtatttctccttatgcttttgaaaacttggtacaactgttgaacatgtttattaggttttttgtatatctacttatgttaatttcaaaacttggtataactgtttcatgttctattgttttattttggtatatctacttatgttttgtaacactaggtacaattatatgtttttgtaattgataagaaaagaattttaaccgaaataactagattcaacacaacacttagtctttataattagattcatatccattcatcacatcaaattcaacacttagtctacataattaaacattacaacacttactcttcataattaaacattacaccacttaggcttgaatttctacgacaaacacaacatgccaacaattgccatggtgattaaacatccacaactaaaaacgattaccatcttaaagtcctttccctttttattcttttccatcggatctctttccatcgtctcttggttcctatccatcttcatcactcttacttcttcttcaagaacaccgagttgaaattccaactgttcaatctcatgtgtaaaagcctcatctacccacttaaacacatgtttgtcgttcataagctacattttgaaattgtaaaaattgttaaatcacatgtatatctatgtataaactaggtatatctattaagtatatctattaggtatatctattaggtatatctattaggtatatctaggtattttagtgactagtcaaattattgtcaattgcatatcagaaatctataagtgaaacgtgaattgaatgaaaaatgtacccagaaaaacgaaatgcttacccaaataattccactcttctctctttttctctcttcttctctcttttgagtcttctctcttcttgtctcttcttgttctttttcgatttgattttttttatttttgttaataatagggttttaaaaaatttctgcgaattggggagaaatgaaaatttaggggaaattttttttgatagtgtgaaaaggaattgatagtgtgaacacgtttcttatagtgtgaaaaggaattaaccgtgggacccgcgtacgagttgttcagaacaaaaagggtggggcccgcaaactctttgcacacagatattccaagttaacaggttgtacctgtgtatacacagtttgacttttgtttttttttaattttattagatatacttaaatttaaactaaacaaatttagttataccaaagagttttgatgttttataaacattccacatattttcatagaaaaatatgtctggaaaattcaattttgtgtgttttgcaatgttatgatgataataattataaagttatcttcaaagtgtaaggtgtttcttttataacaaatgaatttggtaaagactaattttttgaagtttcattaaattatgattttattaatcagtagttttaatactcaacataaggggtataatttgtataagaaataacatcacatcaaattttgttgcaaattaagcacatttgttacatttgtcatagttgtacctttacaaaaccaagtttaatcaagttttacaaaaccagagagtacaaaaaacacgaatttagagacatacatagttctaccatttaaaaattaagtttaaccgagttttacaaaatctgaaagtacttaaaaacatgaatttagagccatacatagttctaccattagagaataaagtttaaccgagttttacaaaatctgaaagtacttaaaaacacgagtacattaatttccgcttgtgtattggccactcccctggctatcactttcgtggtttggaaaaaaccggctctccaagtttctgcctttcacacgcttattcttggggcgacgttctccaactgatgggtgtctagtttcttgaactcttccctttttaacaacatgaaccggaggatatgcaaacaattcttggatttcacttggaataactcactctgacttatgcggcaccggataaatggttctatcatatgccataacccacatctcaacaaagtaatatttcgtgatcaaatcatataaactttttacctcctcggatctatctttttgtttcaagtgagtcatcacagccgctattgcatgtacacaaggatacttgtccaagtcaaaacaacgacaataacaacttttattcctcaagtccaccacataggtcttaccatcgcgaccaatgacactatattgaagctcgtaggtgttaagctctatcaccggtaatttttgtgcaacttcacatgtttcatgtatctcgttctccacaaaaggaacaagtctctgtaaatttgatccacttaaggcttccttcctattattgcagctccattccgcaaatttctcaataattgcatctatcataggtaatagcgcataccctctcacatccctaaacacaccattcatagactcaaccgcattactagtgtcaacgttgtactttactcccggaaaatgacatcttgcccatttttccaaatcagtgttttcatcaagataggtggctaccttagggtgccttcttctaaactctgcatattcatgttcaaactcagacactgaacaaatggatgcaattcttctgaacgttttagcaacctcttctttgttgtatgcaacttttgttctcacattctgtgacaaatgatacacacagtttccatggtgagagctcgggtacacctcagccactgccttgatgaggctagaatttctgtcagacataaagaccaattccgaactgtctggtataacggttttgagagttttgaaaaaccacttccaagtaacatctttttcgccatcagctacagcaaacgctaagggataatggtgatgattcgggtcttgagctgtggcaaaaatgagcacacctttatatacagtcttcaaaaatgttgcatccacaataatcacttttctcatgactttaaatccttcaatggcagcccccaaagcaacaaataggtacttgaaccttttttcttcatctaataccacactagtctttgtgccaggattcaccttctctaacaaatacaaatattgataaaccatcttgaaactctcctcgggactagcacgaatatcactaacagctagtttttccccctattagtagtcgagtatgacacagttgtaccatgttttccctgaacaaggccaatgagacttttaggagttggggtcttgtactgacatagataatcttcatgcaatacggttgcaactaaacgtggtgtacctctccttttaatgcctgtagcagtattcgaccgtacacatgtatggaacttcctatatgttcgaaccgagaagcgagttgaatccttagccttcgaaaatcgtatgtaccattcacacccttattcagtacattttaccacataccgcttcttatccgagttgagtaatgttagtccaaaacaattcctatttgctcctgtcacatcatcgctattttcaaattcttgacctattactagatcaagaccatcatcccatggacctttaaacttagaatgttggctgtcacgtggttcctcaacatattcacgaataccatcattctccttactcatactcatattactattaacaccattatccacatctctaagaggctccaaaggctctaaaggctccaatgtctccaaaggctcagcaagttgttctcctagtggctcatttgcgtaaagagttatagcaccaacattagctctatcatcattatctagaccaccaaaattctcctcttcataattcacaccaactgaactctttccttgtactctcgattgttgctcgtttaagtgaaccatttccaactcataccgacttctacatgcaagacacttctacttttctcttcatccaacgtggttagataaacatatacatcatcatcatccctaatatataaatatgtaggaggtttaacacccgttggaatgtaactcaatttcagcttcatcgtagattcatctatcttcatctttgtgcatatcttatccactaaccacgaataagtaatctcctccattgatgatgtactaaacaatataccatacaaaccaactacttttggattccattgatatgcttctccggtttttgaataatatccatcataatcaaaatatatgattatgcccattctcctggaaaaaacaaaaaaaaaaacgttagctatacttagattttcctgttctagcaaattgtacttcgaacagctataccacgctcattttcagaaataccagttatactattcaaacagctataccacgctcattttcaaaaataccagttataccatcaattgtacttcaaacagctataccacgctcattttcagaaataccagttataccataaatagtgcttcacacagctataccacgtttcttaggtatacctagattattctgttctagcaaagattttcggaccaaaaacagtaatctgcctaagattaactacgaatcaaccattacagtacattaaaatgtcttaatagacccagaatatatagttaccaacataatgtctattaatttccaacaccaatttcaaatctatcaaatctaattgaaatctacaaaattcaaacacaacaacacaagacttgatgaattaagatgtccaaagtataagaagagaatggtaaagctcactttgaataacagaagcaaaacgacggcgagcttggtcgattggattcaacgtcggaacaaatcgacgttggctgcagtcgtcgatttagattttgtgagggaggaaaagaaattctgggaatttctgataggttaatattttgtgacttaaatggtattggtttggagacttaaccgtaattggttggtttggttcgtccgtccggttccggtttgttgggtaaggtaaacaaggatttttaaaattcattaagagtataggagtatgttagattatatgagagtatttagactcattgtccgattacagctccgtcgatttgatctgaccggagactaggtttcgccttcgagagaaaaattaggggcgcgtgtcacacaccatctttcctttcctctcaaccgctatcaaagattgttcatcctgaaatttggttgctttctttcatcaacttctactttttttctaatcagcttctcgtccctcaattccaccgccaacaaatcatgttcttttttctctgagatagttgaatcatccacaaaaatttttgatttcttatctgatggttgagatttaatatcagagtggacatccatctactgcaagtttacccacaaggcagcatcaatgagtgaatccctgagtaaaaaaagaagtggaggaaatattagatcttataaactaatggttaaaacgaaaaaaatttacacatgaactaaaggtgaaaataaaaattacccaagatctttaaactaaagattaagcaatagtgatgatctccttaactttattcatcccaataatctctctaataatgtttgcaaattagaaaattgcataaagaaataacttacgtttgtatgaagagaaaaaactgtagataataaaacaaattatagcgatggcaatgatgtacccataatataatatcctacttatatcctactttttactttttacagaagcttgtatcctacttccatgtttcaaaataaaatataaaccttgtcactaacagtttacatcaagttataaaagaatacattgatttagacaaatatccaactaaaataaatttaattttataaaaaaaaaatatccacaaggtcgtttgattctaatccaagtcattagtagtttgtaacgacaaagattagagaggcggtttagtatatgtgatactgtttcatatagcaaagaatgaaatatagaaaattgaatcaaacgaacctcttataataccaaacttttaaagatggtaaaaactataatgtagtagtacaacagagctctacattagtctcatcagttctccttcttctaagtaaatcttaacataggtcatgatataatagattttagtgagacttcagaaaaatccacaaaattgtaccttatcatctacaagaagaagattcaatccagtgaattcccttatttatccttttttttggggaaatccccaagggcacttctcaccttgattttacatcgatccgttactagagttatatgagagataggtgtaatattgagtgacataattggagattggaatttggaatatgaacctacaaataaaaagttgtttttcttaaatagagaattttatgagcaagagaaacttatgcaatttagataaagagaatagaccatgtgggtcagtggttcgacacagtaatgccaaaaattctaaaatttgcagacacaataacaccaaatcacttgagagaagataattgaactataacaaaatttacaaacctgagaaatacgaaaacttgtaaacttgcatagaggaagagacatgtgattgatgataaaccctaaaagtaaatcatgtaacgacatcatacccaaagatgaattggaaaccaagaagggatgatgtgaagaggagaggcaaagtgagaggcggaagaaataatgatactttttcggttaaagaggaaaggttgaaagtgaggaataatagggccatgtttgtttgatcatttggaatttgcatccaaatgatccatccaaataatccatttgaatgattcatcttaatgatgtttgtttgattatttgctaatcatttgctaattcatctaaatgcatcatttagatggagctttgtttgtttgatcatttggatgaatcattcacattctcatatatatatatataaatgactaaaatgccctctgttaagtaacaaataatcaataactacattctcatattaatcaaagtagagtcttaaaaagagagttctctgtttccattttctaagttccttcttatgctctgcagttccctagcccgaatgagtactcagcatttatgggagacttctcaacctgcactggtgttgcaacattcacaatgatgctacaatatcaatgataaagaagacacagtaaatggttgttagtaatagtgattgatactattcaatgattgatagtactagtgattgatactattcaatgaaaggaatacatgagcttagagaccaaccaatattcacgtgattcaattatgacaaaccaagcttaaagacgtgatcatgtgaatactattatgaatcttttacagaaatacgtagatacagagacatgtgcaagtgaatgaaagatgcagaacttgtaggccctttgatgttctgagagaagttaaaaccataaacctgaagaaatttcaatagattcctagtgtctagattagttagggaataaattgggaatgagaaataaaactaaaacgtctaaaacctttttttcatgagaatctaacaaaagatgttgcagagacttgcccttatattcatcaagttattcattgtgttgtactatattagtagtgttactttgttgttcttatggttgcaaagaacattgtaaacgcatctagattgaaatatagtttcaacttacgtagaaagcgatggatcaaacgccctaactatctgaacatggcacattacatgatctaaagatttaggatctaaagaagtgggaaggctttgctaaaacgaaggttagctaactccttaaactcagacacttaacagttacatatcatcaccatttaaactccttaaaacaataacacactaaacagttcataaacgaaagaatatatgatgatgacttacagtgattcttccttcaatccttaaatccttcaagccaaatctggatcctagctttctgcatcaaaaacacaaaagacctataatcaaagtaacacaactaaagctaatagaataatcaaagcaacacaaagcaacataagcaaaacaaagccgtaaactaaagctaatcgaagaatcaaaagcaacacaaagcaagcaaagcaacacaaagcaacataagcaaaacaaagctgtaaactgtagctaatcgaagaatcaaaagcaacacaaagcaagcaaagcaacacaaagcaacataagcaaaacaaagctgtaaactgtagctaatcgaagaatcaaaagcaacacaaagcaagcaaagcaacacaaagcaatataaggaacacaaagccgtaaattaaagctaatcgaagaatcaaaagcaacacaaagcaaagtaaagcaaacccacaattaaacaatgtaaccatggtggatcaaacccaagaacaagtgattgcaacaaggatacaaagagaaacaacgagagagacatggagcgagagagaggaagcgagagagagagagagagcaacacaaacctgtacactccggcgatggatccgacgagtctccggtgaagagaatcggcgactgcgagaaaaatcggcgacagcgagatcacctcgacgacaatgaatctcgttttcagtgttttgtgtcgtggagatgctgaagaagagatgtggtttttgggtgtaattccatatattagattagggtattattgacattttacaattttggctgaaccagcttcagcagaatgaatagattaaactcagtcagattttctttattttttggatgagtttagacaaaagcattcaactgaatcattcaaatgatctcttaaaacatgaaaaacaaacatcagttttaatcttcattgagatggtttatccaaatggacaaacaaacaggacctagatcgtgtgactgaatgacccgagcagttgattttctttttgtcgtaattttttttttaacttaacaataaggtgtttccttttacaaattacaatcttgaaaggtgaaaaatgagacttatgacaggtgtgagaaggagaatgtgacagttttttgtaaattaacttgtgatttattagataaagatttgaggaagtttgtttattatttataatcgttacaattgaaatcatatatataaaagcttaccaactctctccataaaattgacacataatcaatttagcatttgccatgtgtctattaaataattaatgtaagctcttcaacttctaatttataggttaatgatatatttattatttaattttatatacgattttattttatatatttaattgtactattactaaatttgttttaatattacatgacctttcaataaaaccattttaatagttttctcatactcggagattttttttaatccaaactcaaagtatgagtgtataatagtcgtggattacttaatgatttaagttagttattctcttaaattgatatttagattctcttatattgatatttatgtaataaatcactgagggtgaagaatacgtaaggagctccatcatcaaattcttaggtttctggaatgcaacactaccctctgttaaattgatttaagagaagcgttgtttatgaattctgtatacgatgcattgttgagaatgttgttaagaaaatattttaatactaaaagtaattgcttattgcatgagtgaatgattagataaataaaaattatatttaaattaaacaatataaacaaaatccaaaaaaatgcggcgtagcgcgggtgaacacctagtgtaagtaagggaaaaattgctcaataataacatcattgatctcatttcaaagttattaactaataaattaagaatgaaaaatggagttaataatttactaactaaccgcattaatgaataaagataattatttattagtatatgatcttttatatactaaatacacatgcatctagttcaagctaagtgaaggaactattttcagagtgaagcaacctttccaaatttataacaagagagttccaagtaccaaatatcaattttttctcactcttaattgtcaccatgcaagtaacatcttcaactacacatacccaaaaatttgaaagatttcttattttttgttttatttataaaattaattggctcatacacgcacatatcgtcgaagatagagatagtttacggtgacataggctgtacgaagttacttttaagtccatcgtacatcaaattttgggtttaaatgttagatatgcaattttttatatgggatataggatatcgatgatttttttttttttttgaatagagttggtgttataatttcatgtgttggattattcatttaggagtagtagatttttcttctttttttgaacaaattaggagtagtagactagtagtcaaggtttgttcattatcgaaaataaaattcataataacagcaataaaacttataagttataactccaaatgacaaggtggttcgttgtattttgctagaaatataaacttgaaattttcaaataattagtaagttttagacattaggtattctcacaaggcaacattccgaaacagtaggagctaccacaaacagcaatttaatttgttgtccgtattttttctggtgacacggacatctccataagtgataatttaagtcgtcctcaataaatttagttttgtttacacataacatccaaacttttgttttataaccttaaattgaaagtaaaaatattttgaacagtaattgtattccaaagttttttttgtttttttttttgcttataaccaggagtttcagggccgatgtccttattccccctcaggatccgggtaagaccaggtgaaagcccctggttaagtggaaatgactagcaatttcgcgtttgcggggaatcgatacctggtttggaccaacagggcaaccaacagggcaacgcttcctcaaatgaaaccactagagcatgaccacttggtttcttttccacaattgataataaataatcaataatagactgattggtaccatttaaataggaattttatttgtcataatactcaatctatttacttttggaattttcataccccaactttttggttagaagaaaaatacttcatttaaaatatctttgtctaaaaatacttcatgttgaattattggtggattcaagtttacgacttaataattattaacaaatattacaaaatcatttaacgacgttaaatgttaaccatgtgtatataaatagatatatagactttttattcaaaatcttacaaatatattggtgtggtctagtagtaacaagtagtttatttaatgttactgcgttaatacgattgataagcaggttttttacacctacttatatgttgaatgtgtgtgttcagttcaattcctctaaaacacaaacatgtcgctgcagttatagagggtgtcaatccagtccactgtattactatcaatcaagatgtgtacaaaaacaactaagtcaagccaaattataaagatggtgggtttctagtaacaatcctagatcaggattcaaacaagtaaaaatgagaacttaacagctctactcgatcaataggtcgagtagaaccaacaggtgacaaaattaagaactaaaatgcaatcaacaggggatgcaaataaaggatacaaataacaggtaaataaaagtgcaatcaacaggggatacaaataaacctaatagaagttctaaggatggattcattgataagggtaactctagggttcatcaaatggctaataggcgaaaggtagatacccatgacgatagattcaaaaactgggtcaatccactctcgtgacagagacccccataactctaccacttcctaatctcaactctcgttgatgaaacatagcagagcagggtttaagaaacaatctaccaaagccaataggcagacaagtcaatcccttggtcgagtctacagatctctggaattcgtaggcagacatccatttgaacgtcttttggacgctggacgtctatgatcgaatctccacattagccaccgaaaaccgcataggggccaagcgaatccagaagggaataaacctaaacactaaccacctaactaacctagagattaccctaatctaatccatcctcaagaaccctaatcactactcatgcaacattctcaagaacacaaatccataaattactaaaatcataccaaaatgtagatctaaacaagctaaacaactttacttaaacaatcaaatgcaaaaacgaaatagattaagaataattaaggtttcaagattcataaaaacaaagaaaaactgaaagataaagcattgatattttggacaaaccccaaaatgatctatttatagtaaaatgttgaaaccctagattcactagaagacaagagacttgaagcgatttgggcaaatactcgatcttggggatcgagtaaagagggtgctgcaaagtctgcgcctttgtgtctatgctccgagtgatcaattggtcgagtagatgcttcatcctctcctatccgtatgcttagatgtctggttgagtggggaatgaggaggatccgaagacgctttgatagcccaacaagtcttgtagagatggtcaccctaggtcgagtaaatggatcgagtagtggatcgagttggaggggcgagtagatcaatctgctgcttcatctgaggttgccttgatcgagtaggagggtcgagtaaactgcagcctcctctgtggcatcctggatcgagtaaagaggtcaagtagaatgatgtctcttctgtagctgcctggatcgagtgaatggatctagtagagtccttttaagctccttttgcacctgaaaacacaccaaaacatgcaatgcggatgcaagatgatcctagatgcctaagtatgcaaaacaagctaaaatggtgcaaaatgatatgatacaatgagcaaatgcaaagctaaatgatgattaacatacacctaaaatgtgtaaaatacagtgttatcaacaatcaaaactccatctttctcgaaccatttcttttatctctccacctttaccttaattcttctccacttccgcaactaacctactccacgaccacaaaaataacatatccagcaccgtcgtcatctttgtctcaatctctcatgtgttaaatgtatttaaatttaaatttgtaggagtgaagaaaatgatgtatttaaatttgtatgacgtcattcattatagaaaataagacatcaaaagaagttctatgcaagttgaataacaaacgtgttaccaccagatcaagcaatatatttgtagaagtttgtaaaaatattgtatttatttattcttacatggaaagttaaaatttaatgtagtttactgattctaaaacgcctcgttaacggctgttaaggagagagatttgaatctactaacaatttaaaaataaagtttttaagacaaaaatatttaaatgaggtattttatcttctttggctttggctttggctttgtatcttctagcaaggaaacactactatagcttttgggatctggttgcggttctagttcttatactcattcatatacatgacatctagtcatatttgactccaaaacactatacgtgcttcttcttacttctcattgttttgatagtgtagccaaaatccgtatgaattttctgttttagatcttctaaaagggaaacactactttagcttttgggatccaattgcggttctagctctcatacttaatcatacacttgacatctactcatatttgactccaaaacactaaccaagcgttttcttgtttctccatgctgtgatggtgtagccgaagtccatatgagttttttgtttaagatcttctaacaaggaaacactatttaagctttttagatcccgttgttgttctagttcgtatactcaatcatacacgtgacatctagtcatatttgactccaaaacgctaacaaagcttcttattgtttttcaatgctttgatggtgtagccgaagtctgtatgagtttttagttttggatcttctaatatggaaacactactttaactttttggatctagttgcagttctagtcttatacttaatcatacacatgaaatctattcatatttgacgcctttagttctcaatgcttaatgagaagccctattcctaacaagcacactactcagacaaattgattgaagcaaacaacataattgagtatgaaagcttaaatacagcaataaagatgagggaaagaaaggatctcttcactgaattgaaactgaatgaatctctgaagaaaaggggatgaatagcttatgtctctcaaaatagggtttgtaaaaagcttgataaaaagaaaataggtctaaaacaatgtatataaacactataaatcgtccagggactaataatgcaaatagggaagttttctggagcaaatttcctcttctgtaaacttgaaagcgtcatggactttgtttggccgaagctagtgtcgatcgacaccaggagtgtgtcgattgacactcctcttgattcctgagtccaaaagcatcctcaacttccttttccttagcttttgctccaaaatgtctcctcatctccattgttgtcccattgcatggaatacctgaaaaaacactaaaaagactcgagaaataacataaagactcaaaaacctatatctaaaacatagataaaatcattgaaaatagggttctatcaaagatccaaaaccaaaaactctaacggacttttgctacaccatcatagcattgagaagcaaataagctttggtagtgttttggagtcaaatatgactagatctcatgtgtaagattgaatataagaactagaccgacaaacggatattgaatacttaagtaatgattgcttgttagaagatacaaacccaaagactcacacaaactctggctacaccctcaaagctttgagaagcaagaagaagcttggttagtgttttggagtcaaatataactagatgtcatgtgtatgattaagtataagaactagaagcgcaacgtgataccaaaagctaaagtagtgtttcattataagatgatccaaaaacaaaaaatcatacagacttcgactacaccatcaacgtattgataagcaagaataagcttggttagtgttttggagtcacatatgactagatctaatgtgtatgattgagtataagaactagaaccgcaaccagatcttgaaagattaaaagattaagtagtgattccttgttagaaaataaaaacccaaagactcatatggacttcggctacaccatcaaagctttgagaagcaagaagaagttgttgacgagctaattggaagaagcggacctgaaaatgttaaaccactcgaccccctggtcgagtagatgcttcactacttcaacagaccacttgaccccgtggtcgagtaaaagacctcagcactccacgtcaccactcgaccacgtggtcgagtaccaccaggacaaccactcgatcacatcactagaccccctggtcgagtatcatcatgcccaccacatcaccttcactcaatcactctaccaacaggtcgagtatcactattatcatacactcgaccaatcacactaccaacatggtcgagtatcaccatcatcattcacttgaccaatcactctaccaacaggtcgagtatcatcatcatcactcactcgaccaatcactctaccaacaggtcgagtatcaccatcatcattcactcgaccaatcactctaccaacatggccgagttccaccattatcattcactcgaccaatcactctaccaccaagtcgagtactaccaccaccatccactcgaccaatcactctaccacatggtcgagtcccttatcatcattcactcgacgtctttactcgactgccagcttcagagtcttctccattccgcactcaaccagacactcgagcacaaggaagaaaagaagactttagcttatcactcgaccactcactcgaccacctgggtcgagtactgttcttaatccgtcctaatactgcgtcgttttgagtattagggtttgagaaatatttcgctataagtagcatgcacttaacattttcgacaagaagttttttatctagttttatttccgcagacttagatttggttaatgaacttgttatctagggttaatttattgagcatgccaatcacctgtaaactgaggaaacgaaactactcaattaccccatccttgggaattctttatctgattgaattctttgtttactctactaatgtttactacatcttgtcatctgttgcttagtttctgcaattctttactgttactcgacctaatactcgaccacccagttgtctggcaacacactgtgcagtcgagtatccctgttatactttctgtctgttactcgacctatcactcgacctcacccagtcctctgcaaagagctgtgttggtcgagtgttttattgtttttgcttgaatttctgttttctgcatgttcacttagaacttctagaacacaccaagacctgttattgcttggcttgacttagtgacttctgatcacatcttgattgttagcctcacacccatttggattgacaaccttcagtactacaacgacatgatagtgttttaggattaattgattttaaaaacctattatcacttctaacaaggaaacactacttaggcttttaagatcgggttgcggtttaagtttttatactcaatcatacacatgacatcaagtcatattcgactccaaaacactaaccaagcttcttcttgcttctcaaagctttcatggtgtagccaaagtccgtatgagtctttggctttgtgtcttctaacaaggatacaattcttacggctttaagatccgattgcggtttaagttcttatactcaatcatacacatgacatcaagtcatattctactccaaaacactaaccaagcctcttctagcttctccaagctttcatggagtagccaaagtccgtacgagtctttggctttgtatcttctaacaaggaaacactacttaggcttttaagatcgggttgcggtttaagtttttatactcaatcatacacatgacataaagtcatattcgattccaaaacactaaccaagcttcttctagcttctcaaagctttcatggtgtagccaaagtccgtatgagtctttggctttgtatcttctaacaaggaaacactacttaggcttttaagatcgagttgcggtttaagttcttatactcaatcatacacattacatcaagtcatatttgactccaaaacactaactaagcctcttctagcttctccaagctttcatggtttagccaaattctgtatgagtttttggcattgtatcttctaacaaggaaacactacgtaggcttttaagattgggttgcggtttaagttcttatacttaatcatacacatgacatatagtcatatttgacttcaaaacactaaccaagcttcttctagcttctcaaagctttcatggtgtagccaaagtccgtatgagtctttggctttgtatcttctaacaaggaaacactactaaggcttttaagatcgggttgcgatttaagtttttatactcaatcatacacatgacatcaagtcatattcgactccaaaacactaaccaaccttcttcttgcttctcaaagctttcatggtgtagccaaagtccgtatgagtctttggctttgtgtcttctaacaaggatacaattcttaccgctttaagataccattatggtttaagttcttatactcaatcatacacatgacatctagtcatattctactccaaaacactaaccaagcttcttctagcttctcaaagctttcatggtgtagccaaagtccgtatgactctttggctttgtatcttctaacaaggaaacactacttaggcttttaagatcgagttgcggtgtaagttcttataatcaatcatacacatgacctcaagtcatattcgactccaaaacactaaccaagcctcttctagcttttccaagctttcatggtgtagccaaagtccgtatgagtctttggctttgtatcttctaacaaggaaacactacttaggcttttaagatcgggttgcggtttaagttcttatactcaatcatacacatgacataaagtcatattcgactccaaaacactaaccaagcttcttctagcttctcaaagctttcatggtgtagccaaagtccgtatgagtctttggctttgtatcttctaacaaggaaacactacttaggcttttaagatcgagttgcggtttaagttcttatactcaatcatacacattacatcaagtcatatttgactccaaaacactaactaagcctcttctagcttctccaagctttcatggtttagccaaattctgtatgagtttttggcattgtatcttctaacaaggaaacactacgtaggcttttaagattgggttgcggtttaagttcttatacttaatcatacacatgacatatagtcatatttgactccaaaacactaaccaagcttcttctagcttctcaaagctttcattgtgtagccaaagtccgtatgagtctttggctttgtatcttctaacaaggaaacactactaaggcttttaagatcgggttgcgatttaagtttttatactcaatcatacacatgacatcaagtcatattcgactccaaaacactaaccaaccttcttcttgcttctcaaagctttcatggtgtagccaaagtccgtatgagtctttggctttgtgtcttctaacaaggatacaattcttaccgctttaagataccattatggtttaagttcttatactcaatcatacacatgacatctagtcatattctactccaaaacactaaccaagctt
